United States Patent Application Publication US 2026/0265781 A1 - sequence listing, part 16

SEQ ID NO: 118 - DNA, 18231092 bp, synthetic construct (residues 6,077,032-8,102,708 of 18,231,092)
  source 1..18231092: mol_type = other DNA; note = Hot spot 2 - Chr 3 contig ref|NW_020822577.1 from Cricetulus griseus
gtcgtgcttcagtggtattgttaccaaaccgggctagcgctctgttgtcacaccctatatggggtgtgagtaaatatttgctcatgtctccccaggtgtagtgttatacaagagaaggtgaattagaagcttcctccctgtgagactgagtgaaaaatcagaatagcaaaagacaggctatggaggaggaaggaaaggagagctttggggatcacaaaaaatgacaaaagggctgaaaatcccaggaaactaggttatggccacagcgccagcacctgaaaactgaagtagctggaagagaacagtaaaacacttcaacaggcacaggccaggacttcatgaaaataattctaacagaaacaatggaaatattgggaagaactgaccaatgtggctgcattaaattaaaaaccttatgcatatccagattgtggactcacactagatgtggtggtttgaagaaaaatgcccccaaagggagtggcactatgaggaggtgtggccttgttggaggaagtgtgtcactgtgggggcgggctttgaggtctcctatatgttccagccacacccagtgtctcagttcatttcctgttgcctttggatcaagatgttaggactctcagccccagcaccatgtctacctgcatgccaccatgcgtcctgccatgacaataatgactaaactctgaactgtaagcgagctaccccaattagatgttttcctttataagatttgctgtggtcatggtgtttcttcatggctatagaaaccctaagacactagctgtcaaccaaccaatgattggatacagaaaatgtgactatatatatatatatatatatatatatatatatatggtatatacaataaagctgtaaagaacaaagtggtatcatttgtaggaaaatggatggagctaaagatcaccatgttaagtcaaatacgccaaatagaagacaaatattgtatgttttactgcatatgtggattctagatttaaaacacatgtaaatgcgcacacacacacacagaaagagagagagataggataggatatggagggaagatttgatcaagagagaaagagataacagataagagagggcagcagagagtagataggagcaacaaagccgatatttgatataaatatacaaagcatgtagtaatgaaaccagtctatctgtgtaataaatacatggtaattcaaaattcattacactaattacagtctttctctaagaaagacaagcacactggcagatgtgctggcagctgttgcttgaagtatagaaaggcagacgatgtcttgagtctttctctacaattctcacacctctcctgaggaattatttggttgtccactctgggcaacgaccttgaattcactaagcaattcaccacctgcaaagttagtgtccttgtctacaaggcatgtttaatatacacagagcttggcctgtcatatatatatatatatatatatatacatatatatatatatatatatatagttatatatagttatatatgtcatatatacttatatatcaaccaacagtcatctgatccctctagtgttccaggagtcccagaacagtgactgatgacacgggcatctagcaactgtcaaatccaccgttggaatggatgtctacttctctgctaatatgattccttggtggctgagtttcctggctttcatcactgtaatcgattcagcttcatttggaagttttacagtctctgcagcactttccacagttgggagataaatagcaattaaaaactcttaggctgtcggggtggctcagtgtgtcagggtgcttcttgctaagcctgaggacctgagttcaattcctgggactcatgagttagaatgagagagctgactcctgaaagttgtcctctgacctccacatacatgcttctacacacacacacacacacacacacttacaaacatacacacacacacatacacacataaacatgcacatacaccatttttattgatttttaaaaattctttaattactactcatatttacatatccatccccccattcccttgccctccaaccctccatgttccccatcaacctccccaacccatcccccaactcctccccagggatagtgaggccctccaccagggaccttcaaagtctgtcatatagtttgggggagggcctaggccctccttgctgtatctgggctgcaatagtatccctccatagggaacgggctcccaaagtccatttgtgctctagggttaaagactggctccactgtcagaggtcccatagactgtcttggcctccgagctggcacccacattcagagggcttggtttggctcaatgctatttccccagctttatgactagggtctccatgctctcactaggtcaggtcaactgtttctgcaggtctctccagtcccatcttagctcctttgttcatccctcctccctctccacaactggatttcaggggtatggttcagtgcttagctgtgggtacctgtttctgctttgaaaagctactggatgaaggctccaggaatggtaaccaaggtagacaccaatctcattataggggaaagttatcaatggcattttctccaccactgcttggattcttagttggggtcatccctgtggaacccctaacatttcccctgtgccagctctctctccaaacctgtactgtctccctctatcagggcctctcctttcttgccctcctctattcctcccttgtctcagtcctcttgttctcctcccccctccattcttcccttcccacatccttcctctcccctcctcccactttggtcaggggttcttgtcgcccttcccttcttccagggactacgcaatcttctcttggggtcctcctcgtttcctagctcctctggcagcacacacacacacaattttaaagacaaaaaaaaaaaaaaaatctctgaaataactttgttccatcccttccaccagagtctaaatatgatgaggccaagaaatttttattgaagtatagtaaacccctgacacaaaggtactaaaaatgtattgattgtctaaatgaatttataaaagtacattccaagattttaagagcaattcaactattttatctattagccttcggagtcacaagattcctgagttaggatccctgccagattatggcttgggtaacctaaggcaaattctgagcttctttgtcatgtaatttccttgttggacaattggagaccagtcacaatgcacgtaccagggccaagagctggtggtagccagcccctgggactccggtgctagctctgcccacctgtagttattcatgctcttctccagtcttaacctggtgacagccaggggaagtagccatgatttgtcaatgtggggaaaaagagaggagactggcgcagggccctttggatgatggccatctgcctgtggttctagcttgctttcactcgactttgttggaggcagaagggaaactttgatgatcagctcaatgattgagactctaccctgggggcagggagtggggacagagggatccaaagagaggacctaggcgtgagcaggtgacgacatactagatgcctttgttatttataacccagtgtgttggtcacagcagtttccatggcagctctcctttggaattctctgggttgggaaacagcaacttccaagtctcctttcttaaagagaaactgagcctgacctttcactgactgtggtggaggcttggttacagcctcctccgccaacttctggataaacatccccatgtcctgccatgggcctgtgtctccttctctctccctgctgtaggggagtctggttttagaggagactggagaggaggatcagcccataggtttgcatagcagccttggggttccagagctcagtcccagccaaagggaagtgcacatatgtgctgcatattaaattcttgctggggtgcggctgttgggggaggggaagcagagggacacataacagagacccagaatggatgtttccaaggaaagctggctgtgcctgtcagtgccatcactcctggtggcagcaggtctgcacagaaaaggcaagcagaggagccctggcagagcactcctcatcactcagtttttgcaaaatgctcctccatgtgtcggagcctggtgggaaactgctatcacttcagtgccattgatgttccacggctggattccccacgcagccatctgctccgtgggctccggtttttaattgtgacacatggaaaactcgatgctttgagagcaggtttaacaaaaatgttcctgagtatgaatggccgaggcacaggtgactggattctctccttctgtcattgctcaataggaacaggccacacatgacaatggagtgtcaagttggcggaggaagccaagaccagatgtccagaacaggaagaggtcgggtgaccacgtgggggaggggagagaaagaaaatgagaagagggtaggggtgaagagagaagaggggagggggcaggctgtaggggtgcagaaaggggtaaaggacagggaaagggaagaagactagaagcagggaggaaaggaggaagaaacgagaggcttcaatccacaggtgctgcagtgagtcctggccacggggttctgggtatttatttatttatttatttatttatttatttatttatttattcttcccagcagaaagataggtttaggcagctttcaaaggccaggctgggacacagttagacacgggctctactaggaagggcttgctttccccctcttcatctctcactggctgccaaggacagtgcacgagcagaacacacacctagtgtttgttgaatgatgactagaagaaaacaaagcacaagccaaagccagcaggggctgggcaagcaggttatgtatcgaggcaagcacagataatggcaaccagtgctgggatctaagacagcagaactagttgtccagaccccccagtggtgggaccatgcgctaatcatgctaactccaccctgcaaggagcaaactgtggctgctcttggccactaagtctgagtattgggcgaaagcctggagatttggatgaacaagactcctggtccttttctgagagaatgtccttcacctttattgtggagcagccttatatacaaacttacaaaaaccccaggtcaaagggttcacaacaggatattgatgccagtggggtgaggtcaggaaaacaggaggtacctgtggttatgctggaaaacaactcttagagaccccatgggggctggattccaacagcaaacgttcaggtagagaagaacaccgtaaccccatggaagaagcctgactgaggctgatgcccatgtgtccaaggaccccaggctggctttggagctatctcctgggagatactcatttgacatcacagagaacacagactcttgtaccacacacgggtaatagatttacaagacctgaagtcgagaaggaatttagaaggccatttaattcaacttccttgtcatacagacactgggacaaaaacgaaatgaatggcttactggatagagtccaaagtagtttctcttttattctgtttgtttttttttaatcttaatatggttttgtgcctttaatagacttcagtctttcccctaggatgctatttttgtaatggtgctatcttggatgcacagggcacgattttacaggcagttgcaaatacagctgttggccggcatgacagagggggtaaaataaatgaaaaaaaagatacttttaaagggcaagagagtttgtgttgaaatgctgcatccctacccaatggaaatacttctggaagtcttcagagctcgtcccacctgtgcctcaatgttctgatttcagtgatattcccagtagaagcaggtagagaagaacaccgtaaccccatggaagaagcctgactgaggctgatgcccatgtgtccaaggaccccaggctggctttggagctatctcctctgctccaaagtaacattgcctctgctccacggcctagtaatggaaacagtggagttggccctgggggctgttatctcctgagacaagctgggcaagcctgggcaggaagggtctttccatcgtactttaaatacaccagaatgatcacatgggtgggttctctcaaagtggaaactccatgtttgggaaggaaaatacagcacagcagccatgctggctaagtgcctctcctgtggcagaaaaccaagagcacacgtcattattacctgaggaggactctgaaatatatgcccagactccatgttaacccattccaaggatgagtcctgaatacatttcttatgaaggacatccccagggaattctgacttatgctctaataaattaaccatcttcacttgaagggcagcattgaacaggtcatagcagtgcacacacctctgactccaacactagggaggcagaggcaggaggatcactgcataagttcaaggttgccttatctaacaaaaccaaagagcaactcttgtcccagcaaagatgaaattccctataccctggacctacttggataactacctgtcaggcttagtgttttctgcttttaaggggctacctctgtaccacaggacactgaataggacacagctttggccttctgaggaggcctttctctcagaaagttccagtaccgaacagtgttgatgttctgctgtgtaacaatacaaaaattaccaggaagggtgtggccaagtgggtggaaagactctgctgaaaggctctgtctgaaggtgtgcacagacgcattgtcaatgctaggttaattattaacagcagtgttggcaaatgctggaccagaggaacagtgtttctacggtgtcagccgatattcaggttcaggctagggtgtcacctgatgagtaccatgtgactaatgccctgggtgccaggaccattgagatccttgaccatggccacctcaaggcccagttttaattacaccagagccactgtttcctgctgttcccagcggtaccatttgtcccaggcacctccccattgttctgccctctctcagttacagtgttcaagtgactctggtttcgcaccattctctcattgccgtggcttccattggtgtgtggtgatgtcagtgctcatgaggacacagctcccttttttcctgattgcagcctgctacacttgtcttttcactctgtgacgcaaatgctgactgtcaccagggctctttcacatggacacatcactgccaggtgaccacgggggtaggacaccgagcagaccagcagccaggtgtgcaggctctgcagggtgttcagtttgttaatggagacagcctcagtcacagccctgaggtcagctgagaggaggtgataaatgtgtcaactttcaaaagttttgttacaacacacagggaaaatttttaaaataaagctaagtagaaagatacaaaactccatctgtgggccggggagagagctcaaccaggaaagcacttactctggaagcgtgaggacatgagtttggtccccaggagccatgtaaaaagagctgagcctgtgatgtgtgcttgtcattccagtgccggggaggccaacacggtggattccagggccttactgccccaccagtcttgcttacctggagaactcaagagcaggctatcgagagaacctgtctcaaaaaactcaaagtggtgtctgatgcctgagaaatgattgtcctctgagcttcacatgcacataccacacacacacacacactaacacacactaacacgcactaccaccaccatcacctcccccattaactaaatgattaaataccactcactacacacacacacacacacacacacacacacacacacacacacacactaacacacactaccaccaccatcacctcccccattaactaaatgattaaataccctctacacacacacacacacacacacacacacacacacacacacacacacactaacacattccaccaccgccattgctgtcccccactagctagatgattaaatacatttgtgggactctgcaggtggctatgcagtcaaagaagcacttgccactcttacagagaacatagcttcagttcccagcacccaaacagcagctcacaaacatctgtaactccaggtccaggagatccaacacctacctcttgtccctggtggacaccagacacacgaactacatgtgtgcatgcaggaaaagcactcacacgcctcaagtctttctgcaaacagaaaaggcttcacactattaagtaagtgtatgactgaaagaccgcacatatgttaaaaaacactcaaaatgctgggcatcgttcaggctccttgggttagctgggttcacccactgccagcggctggaaatgccctctgacacagacatatgacaatcaaaattgaatcagtacttagatgcccgtactctgtttgatgttagtgagggaatgtagaatttttaatgatttagtatcttaaaaataaatgtcctaggggctgtcttgatttgatgcacttgtgattagatgtataaaacgaaagagtccatttatcttagcaattatccagtcatctactttataagttcaatttttaacaagtatttaggcttcacggtgctggcgcacacctttaatcccagcccttaggaggcagaggcaggtggatctctgatttgagaacagtctgatctacaaatcaagttccaggatatccaggtgctacacagagaaatcctgtctcaaaaaacaaaaacaaaaaacaaacaacaacaaaattaaaacaaaacaacaaaaacaagcatttaacaacagttttatttaaattttctttctagtttgggaaaacataacactggagtagaaccccaaattaggagatatgtgtggcctcatctattccaggctggccttaaactcacgatatagctgagtttgatcttggattcctgttcttgctgctcccacttctcaagtgttagaattatagacaagtcaaaccacacttgcactcaaattaatttttttttttttgagacagggtttctctgtgtaagcctggctgtcctggaactcactctggagaccagactggcctcagactcacagagatctgcctgcctctgcctatagagtgctgggattaaaggtgtgaaccaccactgcctggctcaaatttaatcaagtagaaaattgttcatctgttgttacccacacagtctgctgtgtataacatgttctagataaccattgcagctacaaaaagaatgtaaagacagcagcttctccccatcacctccttagccacaagatttctagtgatagagatgagtttcctcctgcaaaggggtctgtaatacaatcagacagcggttggttatcccagggcctgtaatacaatcagacagcagttggttatcccagggcctgtagtacaatcagatagtggttggttatcccaggatattcatgccgccactgcacctgtggctgtcaggctggtggttctaaccatgggacgctgggatgaacagacacacactggatgatctgaaaataacaaattaaacttcccaccctttcgtggttactggcgtggagcctgcttatcaccccctttctagttcctcctctttgcatataaaagcccctgactctgggttttgataggattcaaggatatctgacaagaaatttcacttcccagcctccacctaacctttctgtggtcacatgtccacgttcttaccaatgagatgtgagtaggagaaatctgaaccccccccccattacatcatagccgtagaagaaatttgtctaaggccttctttctttttccttcgttccttcgttccttcccttcctttttctctttcttttctttctttctttctttcttttttttttttttttttggacaaggtttcacttatatagcccctggttggtctggaattcactgtgtagaccaggttggccttgaacttatggagaagctcctcagtggtatagcacctgtccgtgtgcagggaaccagtgatactgttttcatgaatccctcattttggggtaagtttctcagtgctgcaagctctgagtctgtcaagctcccatatgcaaacctcactcaagcttcattaagtaaactccttgttttcccaagttggacataggttgcatcgtttctttggtctgttattacctatctggggtgacaagacacagactcctcggcaaagtatcacaagagacaatccacacaaacttaaatgcttccaaccatcacgagaactcggaaagagatcccgaccagtgagatcttcagatgaacaattgcagctggtatctggactccagtccattaaagacatgaggtacaaggggccgagcaaggcatgctagagccctgacctgcagaaaccgaggccagaaatacacaggttggcttgagcatacaggggacctatacaggaaaaggtgacaagtggtgcataaacatacttttacttgtgagtgacggaacatcacacagaagcagcgccctgagtcagaaggtgagctgcaaatcatcgggcgaagacctgaggccgacctctctggccatgtgctctttactgcagtcactgggaaaagctggaatctgatgctttggagtttcatagatttgacttagtaccaagcccagagtgatttagtcttgggaagcttaactagctaaacaaactccccatagagtacggtcgaaatcaggatgctaatttattaattcaccttggtaaataaaactgccaagtggctctgataaatggtgtctttatgcttgctgtctacagaagtagttctcaacctccaaatgctgcgacccccaatacagtggttcccaaccttcctaatgctaccatcctttaatacagttcccatgctgtggtaaccccacacaagcataaaattatttcatcactacttcatagctttaacttcactgctgttatgaattgtaatgtaaatgtatgatatgcaggatgtctgatatatgacccctgtgggggtcgtgacccacaggttgagaatcactgtttagagtctccccagaaaaaccttaagtgtatcaccagtcttacctaggtagacttctctgagaacagatactgtttctcttgattcctccatatccttgctcaaactgcagcttgatttcatggccagccttgtggtgatttggttcctggaactggctgaacctgcatggtctaggatggccaggaaccatcccacctgggcctcttctttgcactctgctcttgctcacttgccagatggacttttcacccacattttttcctccaagttctgggtcaaggcggaaaccgaatatttggccactaatgtcacccacctggagtagccttgatgctgttgccttactgtttttgttgttgttgttgttttgtttgttttcccatctgttgcttactgacagtgacttctctgcccttcgtgatggccacttcctgtgcctaccctttgcattctctctgcccacggttttctccagccactgctatgacaaacagctccaggcaggtggaaacctggcagtgtgatgtcttagctgcaacatgtcattccaatttctgtctggatcttccaagagccttagagggagagacttgaagaaacctgccaaaaggatgctactgccaggagttcacacccttactaagcacccctgacagagaaagaagaaactggatacatcctgaggtttgttccacgtgacttctgggaagtttctgaaatcagggcaaaaatctattcacttatagtgataattactgaagtgtgtatcttgcattgctctctctctctctctctctctctctctctctcgcttctctctctccctctctctctgccacgccctcactcttctcccactcctcttccctgggatcttgttccaaaaaccaacaatgtgcatgtaagccaatggctaaggctctgatttctcagagaatcctgcctaagacacactttggaggagcatactttgggtctcccctcctgtgatgctgttcctgacactgccccgctggagtctttggtctctgactcctcccttcagtcctgctccagccatgctcctccaaagcaaggatgacacactcatgactcaagcacagcggatggatttgacatcctcggctctccctaagcattctcgctggaagctggaattgctcagcacagctccacctttgtaaccttagccaccattatcttctcctcatattaatattctcttttggtcccatttcttcactattaccccattctctagtctttaaatcttatggagacctctggtgccttgagtgctctcgtttgttccctctgagtttctttcttcccttccccagtccatgatgaagctcatagctaatcgtttcaatcattttctgttatctgttacattctcactgctctatatatttgtctttagaaacctttcttaaaatcacccagtagttctgttctgaagagagcgggtgagtacccactgagaaaaatcacaccatcagccaaaatgatggcattctatctaacctagactccaaagtcagccgtgcattcctcgccgctggccccatctgatgatatgtcctgtttccatgctatcatagcccactgtgcactggaaaatatgcacgtcaatcatcgcatgcctcgtgggcatctatttacaagtcaagggttgcgttaagagttaggaatgggttttgaatgacaggtatggtgccgccccctctgtgatgcttggtctgtctgttgcactctcatcttgagactgtgctcagatacttcaagtattaaactgatctggtcattcatatttaggatccagggtatatggcagagagtccaggtgctatatattttttgttgtatgcacaagcaattaagtgaaaaggtagccactactgataatgtacaacacatgcataggtattccacactcagagatcacctgagctcagtgtaggtgcttgggagatgaccagagggagttctgagtgttgaactaggtgcagagggactgacagccatgctatgcagctacccaggcctctagcaaacagaggtgtggtcagaatgcaagcccgaggtcagactgaggctgggtctcagctgagtatgaggaaacaggggacaaactgaaaaggtttagaaagccgaagacggcacacacctttaatggctgcacacgggaggcaggggcaaacagatctctgaatttgaggtcacatagcaaagtctacatagtgagttctaagttttgtagaaagagtctgtctcaaatcaaaaccaaagaaaaccaaagatgggggactcacacactggcatttcctctctagccctgcggggccacgcctgcccaccctgctgctctgaattctgggtccaagccacagatgaattttcctctctcccctcccccttctttacttttttcccctcttcccctccccccttccctttttgagacaggcaggcttgctgcctcctcctcctcctaagcctgaatgctaagattcaaggcatatgacagcatatcaggcctaagctctttcttgaccgccccccccatgctgcctgcttccctcagtgcctcacctctacacatttgctgttacccctgccctgaagatctccccttccccattcccaccctgtctctagtctcctgggaatgttggaatattatcttactccaccgcaattccccagccacccgtcacattctgtttgagcttgtgtgattactgcctccccttcaggccacagacttcatgaggatggagaccttgcctgtcttgtttcacagttaagcccagcatcctgctctgagtctggccacagcaggaacacaacaaacactcagtgattgcaccccccacacacacacacacaggactttgcattctgaactaacccggtggtgattcaagttgtgcctagatcttcccatgttgacttgggtttagagatgacactcccaggcatacatcttactacaaaactgcccaaactttttttttttttttgacataaaagctcctttaaaattagaatgcactgacacagcattgacaggcggttcagagacacaatggggatttggttcatagtcatgccagaaaaatcaactacagaattgtagtcataaataattaaaatataattgattttcttttttgaattttatgcactagtgaaaaacacttatacacagtccgtagatgcatcattgccaccatcagcttgactgactttaaatcacctaggagaccaaggccaatgctgacatccccctttccctgctttctctctgtctgtggcctaactgttcataatggactcatattgtgaaacctcgagacaaaataaatgtctcctctctcaggttgtttctgttggggactttggtcacggcaatggaaagtaaccaatgcacggtccacacggatgtctagggaggtcggtgggcttgggtatagtcgggtctggaagatcgtggagtactggaaggcatacccctgggagaaggaagggacgtgaagagacaagcaaagtggtccaccgtatgaaactgttgtctcttccatccccaccagaacttggcaaagtctacctcgcatactgatgccccaggagtagatttcctattggagaaatgagaagagctgccagagttagcaaaagactataaaggaagttgtggagacagtcctgggtggccacaggaagcctcacctcagcacagaagcacatctaaaaggagcttcaacgtcaaaagccaccaagtcaccatgactcctggaagcaacaaaggaggactttacaaatgagtcccccatccttctgccagcaccagacgccttactcagggatgctgccttctggagcctctaaaccccagtgacctccctctccacctccaagctactgccacccttcactcatgaccaggcacactttcacagctcctcccaatgtctgaccaccctctgaatgccattaacaccacagatgtaccaggaaatggctgtgaagcctacagtagtcatcaaaatgagacaagggaaaggatgaaatatttaaggcttaatatctattgtccccttcataaagttgtcacaacaagaatgatacaaatgggatgttttaaaagaaagaatgaaatgttttacatgatcacataaaccatgacacgatagcctggggacatagctcaacagcagagcacctgcctagcatgaacaatgccttgactttgattccaagtaagtgaagaaataaagtataacctcagaaacataaaaaatttttcaatcaaagtattttttggtgttctttgcacagctctcaatttgggagaatgatataataaagccaaaaactctaaatgtgaagtattgtattctttaaaatatatattgtgtgtgtgtgtatgtgtgtgtgtgtgtgtgtgtgtgtgtgtgtgtgtggtgttacaggtgactgtgagatgcatgtaggtacagggaattgaacccaggttctctgtaagagcagtaagtgagccatcgctcttaacctctgagccatctgcccaggcccttaagtatagtttttattgttcttacattgcatagtggtatgaaaacttccacattgaccagatgtgcttgggagaaaggaagctcacgggtgatgatgcactttccaaggtctcaatgctcttgacctcaactatcccagagaaattccttctttgactttgggcagagaactccagggaatttttataaagctaagccctcaccttcatgctcatgaaggtcatttgatcaacttttgcttatttgaccgtgacacagtttaaaaatctcaagtcattcttttttattggaaatcatccttttgtttttgttttgtttttttaagtcacagatctgtggagaataggtttgtatcatataaatatttaatgtaagagaagcattaaattttaatttatgttgaaattgtaagacaggatgcagaacatacagatgcggcggtcgctgagtaagtgccgtggattgacctaaaatcgatggtgctcatgcagcactgtggagagtggctgctacatattctgtatcagtaacagtcttcaaggaaagccttcttgggtgtgggcatgctgacacctaatatttggggtcatgatataaaaatcacttttctttctatgaacattcaggtaaaaaacattatcttcattagttccgtctgttgctgtgataaaaataccctgacaaaagacatttaaaggagataaggtttatttagcttgaaatttggagagacacacagtctgtcatggcgaggaagccatggtagaggcagggaaggcaccatggcaggatgggaggctggccagtcacatcacctctgaactcagtaacagtctgagcagttcagctacaggagagtgtccagctcttctctggactttcagaagatagagcagctctgtttcctttgtactttggccaggctcttctcagactggtcctactaaacagccttgctacactctccaacttaacaaacacaggagcagttaattcttgtgaggaacacacaaacaccagtcaccatgctctgtgctgattgaccaatagtctaaatgctccgcccaattctatgagatgggtactgttcccatccccatttgacaggcatgaagactgaggcacataagatgactgtcactatcactattctagtctagtagcatctctaacagatagagacccactagtggctcccaggagatttgaccctgttccaggtcttttcttatgaagatctcatcatactttcctgtcacagtttcctttctgtggctgtggtaaaatactcggacaaaaacaacttaaggggagaagtggtttgttttagctcagggtgcagggtacactccatcatgatgggaaagtccagagcacaattggtcatgtgacacacctgtcatgtgacatttaccagctgcagcagaggggcgaatgcatgtgtgctgatgctcagctccttttttctgcttacacagtccaaaatcctggctggggaatggtgctacccacagtgggcagccatttccgtgtccttgaacacaatcaagatagccctatggcaggcatgtgctcatctcttgattaattctagatttttttcaagctgaccacactaattgttgcacttctgagcagttcatagctcctaactgggatgtatatcatattcttctaagttttctaacacactgaagcaagtgtatatagtgaagaggcccatgaaactctccccagggtgctcccagttgaatgcaattacttctgtgagaacgtcttgaccagtagagtgggactctaaagttcaagtcggtccttctgtgttaccaccactgtacaccgctgctcctcacaggatgagaacacagcatgctgacagccttctcaagctatgcctctgtgccaaaggaacacattgacctgctgaggggatacggccatttagtcactcctgacataagctaatgccatcttagggggggggtttctgatgtgggggagacatgctcctgagaaagtgagggtcctcctttccttctctttatacccaacatggtggtaggtagggaagcacctcactgaggactgaagggcactgtggcttacatgagcattccataaatgcccatctcttaaaggactggtcccggtttaacgttagtgggaggaggtggtgcctttacgagaagcattgtgggaggtcttcacttgtcaggacatgctttgaaggggatctcggggctctggtcctctcctttccctcagctttgctctatggatgttgaggtaagcaattgtcacgcacttggtcatgtgtcttcacagcaagaggacagccagttgtgtgccagagtctccctaactgtgagccatgaatccttcctccttgtaagacgtttgtctccagtatttcattacagtgacaggaggctgactgactcacgagaggggtatagtaggtagttattcgtattcattttcctggtatatgtataatgtacatatagcctaaatcccagtcctttgtgcttctgcctgtggtagttggtcttgactgtcaacctgacaggatttggagccactgtggagatgcacctccggatatgtatgtgagaatatgtgtagacatatttacctgagtgtgggcacatatttacactctgagtgtgggcaacaccacccaatggactcaagtcctggacaggatagaaaggagaagggggcggataccaacattcatctctgctttctgtgacacaatacgactagccacctcatctcagaccccgctgtcacgccttccctgccatgatggactgtatcccctcaaactgtgagttagagtcactcccttctccctgaagttgctcgtgtgtcccgcgcgcgctgtatttctcgccagcaagaaatcacacgcaggacactcggatccttctgcagacaagcttttaatgcatcttgtgaggggagagcataagcttaccagagcggagaccctgaaccaagaaaaccatcccttataaaggctggccagccgcctgggacgtgttaccctatgaatggcttcagctcctcaggccaaatgagccacaggataggcagagatcaaaggaatggagattacccagcgcctgtgaagtaatttacatcttggtgtaatggataatgcaggaaccagctccctacactcgtgccagggtctgctcactcacagaaacacaaaagtgatgctagacagattgtttatcagcctaatgccatttcactgttgatgttaaagcctccctcttaaattatagtgagtattaaaaatagaaatctacaatgtatccatgtatggggctgagtgaggggcagtcggtgagtacagcaggggtgctactggtggatctggcttcctctgacggccccgatccttctgggaggttcagaataatttactaaggtgagaagaatatcaccatcaaagtaagggcatattttttgcacaacatttatactcatcacatataatgcaccttcatctcacacagcatagctggattcaggagagcattcaccctaatgctgatccattaaggtagagtaccagagagaaggcagcatccctcgcagagccatttccaaggcaactgatggatttagggttgtgttcttatttggctgacctgccctaagttcttcactttgaactctttatgagactgcatataatatcatggcataatcattttttttctgaggtccccctttccctgtctgtttcttctaaaagctcatatgaatgctccaattgaataatagaaacacaggaatctgggcagatgtctggcttcataagtgcttgctggggacctgtgaggacttgagtttagtctacagcagccatgtagcaagctggacctagtggtgcacttgtaattccagcatcgaggaggtggacaaaggctaatctggcacactcttgtaattccagcaccgaggaggtggagacaggctgatctctctggttcctttgtgggggttgtcagtgaaagaccctgcctcaaaaaacaaggagagtggcatctgaagaggaatgacacccaatgtcatcttctggcttccatatgtgttcacacacacacacacacctgcacacatgtgaacacaaaacaaagattattaacaatctgaagcctttatttttgagaaaacctctttctctgtctccttggagttcaaaagtgtaggtgaagcataggcgtagtatgtaggccccaccactgtaacaggaaacttgacatggacataggagctcagagaatgctgacgaacttgagagggtcattatacggaagatgctaatggcttaccaatgacaaaggcacactctggagctctactgcccaagttcttgagcactctagagggtgatgaatattagcaaatctcctcgacatttttagatgacaaatagctagttaaaatatctactcagaatttgtgaaggagtatctttgcatgttggttagtttcttgtcagcttggcacaagatagggtcaactgggaagagagaatcttaactggagcattgactccaccatattgcctgtagggatgtctgtgaggctttttttttttttttaaattagtgattgttgcaagagagcctgaccactatggacagtgccacccataggcaggtgatcttgggtggtataagaaagaaagcaaggccaggcagtagtggcgcatgcatttaatcccagcacttgggagtcagaggcaggcagatctctgtgggttctaggccaagttccaggacagccagagctgttatatagagaaaacctgtctcaaagggggaaaaaaaacagaagaaaaagaaagaggaggaggaggaggaggaaatgaaggcaagctgagcaggccagtgagcagtgctgttccaaggtctctgctacagttcccgcctccagggtcctctctgtgttcttggcctgccttctgccttctcctgatgatggactatatagactataagccaaataaactccttcctccctaggttattttatttcccacagcaattggacacagaataggaacccttctgctacaaggcctcacgttggccttttctttttagtgctaggaattgaacccaagaacttttgtgcatgctagccaaatgctctaccactgtatctcagttcaaacctgcccttcaagagaagtatttttaacaatttttaagactttatgcctgcttcctggtttgtctctggatgggggaaagacgagattgatgtcatgagccagtgatactgtccttgagagacactggggtccctagtcattctagcagttagtcagtctcacaaaactctttatgctatttgctcatatctgcaatgtgggggcacttccatctggttgcactttgatgtaaaatgcggttccatatgatcataaaactggtttaaatgcaactattgcaagactagttaatggacatctattatttaacagcatgttttaaagtcatctgcagccagaaaggacaagcaaatctctctctcctctctccactgcactgagaatcagtctcattactgaaaacacccaccaatgtcattgactcctttgttcatttagaagggtttatttcctgacaaaacagaacgacagttccatggctgcctagttggtagcagagactcgttttaaagtgcaatccttctttcttgttgtcgtgcttgtttctaggaggctatcagttgctatttagaggtgtttctagacattttcccccatgtgaattcatcttgaagctacatcaaggtcatcaggaagagacgttattatagaacgccagagagttttccttgctcatcaatgacctttaagacggcggcaccaattatcatttcgattccagtctgtggaaagccactgccgggaaaatctataatgatggtttcttctccctgtgttccttcgtcccaggctagcagctggatgcaccgcgaatctgctgcagttcagccctccaaatggtcaaggagtctctggagtattggtaatgaactcaggtagctgcccagcacagggaaaccccattttctgccatgttagttgagcaggggacagagtttagggcaggttttttttgggggggggcatcaaataatattggatttagatttctggagctgggccagctcttcggaatttgtcaatctttgtcttaacacggtaacactgtgttgagcccttctctgctggcatgcaaagatgagcctcatttgaaatacagaccattagcgtgggcaaggacctcaaaggattttcccatcacagccaccagaaaggaagagaaagaaatgatgtaagggcctatttgtactgcacagagcctggcatggggtaagaggcaagtttctgtctctctacagctcccagcctggcagataacagaccagctcctctcagccactcctctggccaggggtgctaagtacaagaatgaaatgtgtgtggagaagtgagcagatggaggggagcatttgaagggacctggaagccggtcctggaggcctctttgcgatatgactgcaggtcattttgaagggagagctggaatcctatggtgggaagatagctctcaaagggacagagaagctgcattccacgccagcaaagttacacccatgaccttggactacagataatacatatcaagaaaacctatttgaaagcacagtgtaaagcaaggccatgctcctgcctcaccccttctgtccttgaagccctcaagggcaagtaggctccgagaggacctgctcgctgcagtgtctgccagacccagctgctcatgggaatgcagttgcattttttggatatcggcagtgacaagtgagaacaattgctctccaaggtcgtcccctcggagacctacaacactttgcaaccatagggccctgctggtgtttctgggctctggcgcacaccgtgcttatttacactttgtaaacgcattatgagccgcaagatgaagggcctggcctcagacttagagtctctatgctgtcgtggtttattgattcgttactggcaaattttaagtgtctttagtgccatgaaccagactccaagcactaagacatgtgcagtaccagtaggagacacagagaaaaccaaggctcatggcacagagtaaaacttctgtgacaatggcatatacttaatggattctgaccataaccttctaggtaagcatggtgagagagacacaccccaggaagacagatttttcttttctgccttccttttttttgtttatatttcttggtggcactaatgattaaacacaggacttgcacacggtagacaagcactctaccattagactacattccccagccatttttctatttttaattttgtacctagatctcagtatgttatccaggctagcctcaaactttctctcttgcctacatagaatttaaacctttgaatcctcctaccgagacttcctagcaactgcaattacaggtttgtgccaccaggcctaatgaatggccattttgagcaaagattttgaccaaggttaaatggaatggatgaatatgtatgtgtgagtactagaggtgggtgggggaaaatgtggtcacaacagtcgtcagaacacatggatgggcctatgtgctttcttcaaatgttttaaatacaattcagacctcctagcgcctaaaaataaaccccaggttgtacctacagctgtctcagttttaggattaaatactaacaaaacttgacttccttggtcagtgagacttaaggataagattacattgtagaaggtattgggcatcgtttatcacacacagcccccctcagcatccagatttcccagcagcttcttaggaaagaacttttcagctattctcaaatattttgctggtataaagtgaaaatgcagccacacgtggtggtatgtacccataatgcacttctgatgctgacaggcagactctcaagtcggagacatgcataggctacatagcaagactgtgtcccaaagcaacccaaggcagtgtcggcagcttcctggtgctgtaacaaatatagctgagctaaactgacttgcaaagaggaaaggtctcatatggcttacagttgtgaaagtttcagactgtgattggccatcctctttgcttcaagccctgaggagatgtagcatgtcaaagtggcattcatggcaacagtccctttggaaggcctggccttaacagcatcacatcactcatgggagcctgcctgctaaaggctccaccacctcccaagggcaggcaccatgaaggacgattcagggaacattccagatacaatcacagcaggggctctcaacctatgggtcatggcccctctgtcccccaaaatacttacgattcataacagtagcaaaattgcagttaagaagtaacaacaaaaataattttatggtcgggggtcaccatgacacaaggaaccatatttcagagtcgcagcactggggaggctggaaccactgaactatagcatgcagaggaagtctggctagcttgaactttctctctatgcttggaagagcataaaagctttgagagacaagcatgtgttttggagtcagtctgtctgcatcagatcctgacaccataactttctaagtatcgacctagaaattacacagtgctgagcatcctcagtttcatcattttactaatagagactgatgagctggggccagggcttagattttccagagcactcacagagccctgggtttaacagttcccagcactgagtaacatgttatgctgacctggcactaagatctcagccctgggaaggtagggacagaaagatcaggagttcaaggctgtcatccaccacgtagtaagtttggtgccagcttgaacgacatagcaaatctcaggccagctagagctacatagtgagatgctccttccaaaaaccaaatagaaacaaagaaaacaaaaaacacgaagtatagaataatggtatatctattttgtgggatcctcttagaaatgcatttagcacaatacctgatataaagataatgctaacaacttattttatctatcagatacgtgtttgtttcatctataatccatcacaatatatctctctatatattgatctatcaactgtctatcataccacctccatcaatctatccatccatctatctatctatctatctatctatctatctatctatctatctatccatcatccacctacctatctattatcttccaaaagctatctatgctacttataaatcctcccttaaccccatacttaccagggagctggaccacctagagtgctgcttacatgtgaatcgcattcatttccactgaagtcaacaggaagccttggggaaaggataaagataaatgtcatcaggaaaaagccttggctcctggcgcgcttgatggcggtccagctgtgtgagacccttccaggagagaagtattatagactggagacattgactctcagatgcaactgcagaacggatgcacaaggctctcctgccatctcccttaccaccttccagaacgtgttcttcttgaggttacccaggagacacacgctgttgacatccttacttagtggtatcacagagatgaaggaaaggctcgtggggatggagcaatggtcttgccatgctctggggtctgcatagacgtatgctggcatgatctgtatcatgcctgacttttctcatctctcaagatagatctgagaatagatttctattcattgcaaccaaattacaagcttagggaaacagccacaaagaaagccatggtcggatcggttcctgtggtgttgccctatactgatactacagtctttgggagaaggaaagtaatgaagtgagctagaatagcccaagacaactttgtgagggaactgagaattcgagggtaattgaagacagcaggtcaagaaaaaaataattttggagctaaagaaatggaaagccgtcaaggaagacactcaaagtcttggtctgccacatgcatgcatacacacatgaaaacacacacacacacacacacacacacacacacacacacacacacacacacacaggtattttaagtattgacttactaccttatagaaaagctaaagttctatataccctaaccctgttctagacttccacttccacctttcctcctctctccccctcttccttctcctctctctccctctttcctttgctggaaatgaaccccagggcctcatgcatgctaggagaacacttagcactgagctatacctccaggaatacaagaatgaccaactgtcatatttattgcaatcccaagtgtcaaggggaatttgctattgcagtcaccaaataactggagcttcactcagcgacctgagcctgcagtgagccagagtcaggaagctgaactgaaactattgcactgagtgcagtcagcgctgccaggtgagtgtttgtcctgtgtgctcaaaaaccttcctgcatcacattgatgcatgcagattttaagtaggccgagcctggaagcctgcattttacctcactgccaggcaggttgttgcacacacttgagtctgcaagccaaagctcagcacacttagcttacagccccttttttggacattgcccacattaagaaatctaccttatagagagacccagtacacacataggccaccagaaatgatgccctcgtttactacaatgagacagtagtgacgggtttgtcttattctaattcatcgctaatgcctgtgatttatagtgtagaccacaaatgcgacttgaaaaaaactgtctatatgaagaaaaactattaatcaaggctcacatggtggggaactaaggatacaggaagagagctacttctccattttaacatttctaaaaagtgaatctcttttgaaactgtggctaaaacaagggccttattttacagaaacatccacacacatgtatacagtttcttctcctttttcaagaatgttttggatctctcttgtcaatttttttcttttttagactctagagaaatggtcatcacactccaggtaggagcagaagtcaggaggtggccacctcattacctcatggggtcagagcagggggagtgcaggaacatacacgctgctgaagtttgaggtgttgcttcttcctagccttagacctcccaaacttagagaatgatgaagcaagatacccactggctttttttcctctgatatcacaggcatgaggtcatttgagaaaaatattgccagaccataaggagaggtggcagcttggagatagttcttgaggagacagatgtcattaattggggtaggaaaggtcagcaaaagtgagggccggaaagagtacgctatgggttgaatcggaaatggctcccacaggcccatgtgttaagcacattttttccccagctggtggccatattttaggaggctgtagaaccttaggaggtggggcctagctggtagaaataggttactagaagtgggcctttggagtttgtaacccagcagtagttccggccactctcttcttccttggctaccctaatgaaggaccccataccctacatgctcacaccccaatcaatgtccccatgcctttcccgctatgatggactaaggacctttgtgactatgagctaactttcattttttttttgtcagttatcctttcacagtgacgaaaagtaatgcagggtcaggcatccttctttcctccccgacagaggacgggcacacttccttcatccctgactctttgggtcctattttctggaccacaagttagaggtcggaaggcatgacatcttacctggaagtgtttcagtctggtttagaaacagtcccagtactttgatggaaggcccaagaagaaaatggcccaggaagtgctactgaaagtatgaccagtccacacatcttttcctttgggaggctgcgaggtccttgtgctcacagataagcaccagggggaaccaggagtgttgaacacacagggctgtctcttcaaagggagagatgtatgacctgttttctacccagaaggctgggagtggacgtggtttataacctggtgacctctcactatctgtgtggctgagaccacagcaggtccttgccccacccttaccatgagattgtaaaaacctatagaagccatccttacggaagatgttaccttactttacaaagagttttgatatagtcatgtcttaagtttcattgtgcacatggggttgagctatttgtcaccagaattttttttttttcaccaaatggtgctattcttaaatatgcctaaagtaaactactcagagtcaggctttcgaagtttgaaccaacactggctactgagtcctgttgaacagaactgccttcttatctcccacagataattattctgctggccttggtgattgcagggacccctgccctttccaagtctgaatcatttattcattgttcatcagtgatgggctgagaagagataaacctgtggacttgagagtgtaattttttggtttgctatatcattttttttccttgcagtgccagaaatggaaccgagggttcagaatatgtttggcaagcacactaccatgcaggtgaatcaccttccctatctcctttgtctgttgaatatactaaactttattttattttgtatttttacattattttttctgtgaattcactgttatattataaaaaagcatttgttttttacctgtttggaacatgcggggacacagccaggctttcagcacactctgagtagcactgatctagagcaatggctgtctccacatcgtggatgaagaaaccaaggcacagagaatacacgtaactgagacacatgagtcagaccaagtattcccatcatctggtgtggtttaacatctagacctgctccctccccagaggagatgccgggggcttgggaccacgaaagtttattgtttaaagacttagtctcaaaaacaaacagtctataaaaatagcaggcagtaaagcaaagcaaacatatttccttggaagtgtattagcacatcttacaaaagcatgtttcaacactgcaaaatattctttccctacaaatagttgtggtcttttgtcagaaaggaatgccaggaaacacaaaatgatacatttaaatgacaaataatgattctatttgtctatttctgcacttactgaaatagacagttggcagcattgtaattttttgaagccgacagataccttaccagtgcagtaggtagcagtctatagaatactgcagatgccagtgagcaattactgtgaaaattcagagaagcctaaagacaggaattgaatagtcccattgggagaaaatggtgaaggaagtgaagatgccagtgataatttgaagaatcatttgagcattatctctgtagacacctacggttcctcagccaatgataacactctctgctcaggaaagacaatgtgcactataaacatggttgagtccctaaatgtcttcatatgagtggcactatggttctgcttgcagctctcttccagataacagcaatgcctcatcatctcctgctcacagtgtgctcttgctcacctctgtgtctttgaccctcacattcttttcagaaaacatttgatttactctccttaaaagatgaatcctttttgtcttaaactttaatccactaaaagctcggttgcctcagaaagtcttttctaatggaccccatgtaactctgactcagccatctccttgtgactctggactgtgcatttccattctgtatttttttttatgcttgtccatgctttcagctctgcagtgtttgtgtgcatgcgtagtgtggaatgaatatatatattccatgtgtgtacatgcagtgtataatgtgtaggtatgtagtattctggaatggaatggaatatgcatgcaggcatgcatgtgtatgatgtatggcatgtatatgcaatgtgtgtatagtttataagacatatgtcaaggagcaagattttgatgaagtgataaagcataaccgtgtgtgtgtgtgtgtgtgtgtgtgtgtgtgtgtgtgtgtgtacctgtgtgtgtgtgtgtgtgtgtgtgtgtggtgtgtgtgtgtgtgtacctgtgtgtgtgtgtgtatggagagtaggttatggtggtgaagtgatagagcacaggtcgtgtgtgtgtgtgtgtgtgtgtgtgtgtgtgtggtgtgtgtgtgtgtgtgtgtgtctgtgtgtgtgtgtgtgtctatgtgcctgtgtgtctgtgtctgtgtgtggggggcctggatcaggtcatgctgaagtggtgaagcacagtttatcagaatccagtctccttatgctctgggctcattgagagcagagacaattcccccagggacataggtatgtgatggacatgtaagtgtgaccttgggcaactctcattggacagctgaggggattaaactggatgatagccatggactgcagggctcttttgatgtgtatagcacagaaaccttttcatttgtttacatgttattttacatgtgtagatgttttgcccacatatatgtctatacaccatttgcatgcctggtacttgaggaggccaaaagagggtattggatcccctggaactggagtttcaaacagttgtgagccaccatgtgacttctgggaatccaaggtggatcttctggaggagcagccagtgctcttaactgttgggccatctctgtggcccaggaaccttttaatttttgtgtgtgatgctagcacaatgcttaataggtgctgactgtttttgttgccatgatgtagtgttgactcgagagaagtggcccacaattatccttctgagatagacagatggtcattaaaaccaacactggtagttaggacacgcccgtctttcactgtcgtcccccctgtgctaatggtgctgatattagtgacgcttgcacagagtcactctgctttcccatactcctttagtcatggagcatggcattatcatcatcatagaaataataacaactaataataatagagtacgacaatggtaactagcaatgctgaaagctaattatggtacctggaaccacatattctacataattttctctttttttgcaacaggattgcactgtataaccctggatagcctggaactcactgtggagggaggctaggctatcttcaaactcagagacctgcctctgtctcccaattaaaggtatgtgctaccgaactaagcctaatttttaaaattgcatttatttatttatttatttatttatttatttggatggggtggcagtctagcagggagagcagatggaagtcagaggacagcttgtgggagtcagttctcttcttccaccatgtcatcaggtcatcaggcttggccgtaagcacccttgtccgccgagacatctcgccagccctatgattcgttttcacttaacttcagaataatcctgccatcaagacagaccacataaactcagggaccagagaaaacctcttcttcaagaattagagttttaaaccatctgaagcttgcagcctctgaacccagctcagcccacagtagagatctgatagttgctactttggcaatttgtttttttgtgtgttgtttgtttgtttgtttgtttgtttttgctttggtttttttaaccaattacaacaaaaagtagaggaacggctcctaaatcttctggggcaggggtcagaccaccctacccacattttcctcaatgtgccagctttcccattttctcagactgccacacatgtgaagttcgggagttcaggcccagtacctttgctgtggcagctggtcactcctaagcatacacttggttttatatacataattgtcatgtctagaatgacaattgctcaggcaattagacttctctccttaaaaaaaaaagacccaatgcctttagcagtgctatggatccacaagctgtaccccagccaacagtcagaaacattatctcccttccatgtaactaccttcctctctcaccctcccttttgacatatgttctttaagctaagctgtaaattacacattcactatttcttttctaattcttgtttgctattgatcttgattctaatctgatttcatccacataaaaatatcaggcaaactacatcatgtagtttggcttagatcttgcctctggggccagatttgcttttatttcatttatagcagaataagttcagtcactcctaaatttttttacatgcccttagtgttctctgttacacttctgctgttttcatatgaagaaagaagaccagaagaggagggaggagagagagagagggaggagagagagagagagagagagagagagagagagagagagagagagacctggggaaggacataaactaggaatcagccatcatgacgcaggtgccttgtatgctcacatgaggcgaatggggcagggactaggatcaggccctggacgcctcagctttctagattaatttgtcttgctgtctgtggtactagataaaccatttcacttttgcacctttgtttcttgtttgagggatgaacaaagaatatttcttcaatccgggcagtggttgtacacacgcctttaaccccagcacttggagggcagaggcaggtggatctcagtgactttgaggccagcctggtctacagagcgagttccagggctgttacacaaagaaatcctgtctaaaaaaccaagagagagagagagagagagagagagagagagagagagagagagagagaatatttcttgaaggtgtatgcagtggcgcacgcctttagtcccagcacttggagaggcagaggcaggtgtatctctgagttggaagactatttctttgtaagatttttttccaggattagtgaagctaccataccaaaaggctttacagagcacacgtaaacattgctctcagtgaagaaatatgaagcaatgaggatgtgttttggtgctcctgccccacccgcccctgaatcgtagcttctaacactgatgtttgttctttcatcttagctgaatgaactgtaagacagtgggcaggactgactatagaacagtcagtgtgtttctccagtgtgtttctccggggcgcttttgaaagtgccccggcttgaaaggaggctggcttttgttatttattttaattaattgagatgatgcagccctctctatagcccaggatgacctgggagtcacaggaatctcctgcctcagcttggtgtgagtcgctacgcgcagccttctcgcatagttttaaatacttctttaaggaaatctagcttcaggaatacaagaaaatattgtttgtacactctgtttctgatcgaacaaatgtggaattatccaatttaagcatctatgctgctcatcacacatgtgtctgaatgcctctctcttccaaataaaccatcaaaagatgaagttttcccaccacctagaaaatacagcagattgtgctacaggccatgaggtgcttacaaaaggaaggttcctaaggtacccctcactggaccaaatgcacatttcctccaagggactcttgaagccccagcccaagttttgttacttcttaagataattatgaaaagattaattgtagcatgttagcatcacacagatgatgggggatgtccttatgcatatatgtaggggaaactgtagccacgcctgcttagggcatggtcagggtgatgtagggaagttttaagagtgagggatgctcacgtggcgggcccttctttggctttcatctttggcttgctgtacttactgctgccccgccggctggctaggtcgctctgtaagtaaggcttttccctattaaatttccttgtatttttacctgacttggtattggtaatttcccacattacatatatgtttctcttagtggttgatgaatagacactgtttggccaatagctagtagaggcaggaagacaggcaggactaggaaatgaggaaaattctgggaaaggtaggcacagatgctcctggaagggacaccatgtagctgccaaaagagaaacaggtccagacattctctggtaagccaagaccacgtggaaatacataggttgatagaaatgggttaataattaagacagagctagccaatgagaagccctagccatcggccaacagttttataactactatagcgtccatgtgcttatttggggctgagaaggacaatgggaactggcaggacaagaaaactccagcagcacacattgtgtctagctcctcttagcacagaccagagcaagtatcaggcattcactgggaggcaattgtcatttagtgttaagcctttgggaggttaaagagagaaaaagtagttaaaatactatgaaggagatacttttccctccaaatgtaaacttggactccagccatggcaatcttctgaaatgtatatttcatgattccaatgccttcaaaagagatacctttatggtttcagcatttcagatactcatttttaaactagagaagaaaggcactggcaaatagtagaaaagttcatctgactgccttgaccaatgagctcttgagcaatggatacccagtgagtgactatggcgaggtagtttgtaaggcttaacggttcttcacatgtaagtgaccatatcctgaggtcactgggtagaaacaaacatctgaaaatgtatgttcaacttcagataaacaattaaattgaccattcttttctctagccaagaaaccaagtgtgtgccaaacgttgtgccaaacactgtgccaagcactggagatcacacactagacagatagatgttcaccacacctctaggatggttatcatcatatagctttgcaagagagatagagtgtagtgttttgtgatctagcattatatgcaatcgtaggagacaatgtccactggaaagtcccctctgaagcagttcctttatctggggaaaaagtgctggtcagaaacacagtttcttagttagtatatggttctcgttgaactactaaaatcttagcagtttacctagaaatgaatagaaatcagaagagtactggtggttgataggaaagcagttataaggaagaaacatggggctgctgtcagtataccagagctgggctaagatttcagcatgcagaagacaaggcatctttattatggttttaaagagtccaggctactggtggaaccagttaaagctgtttatacaaatgcttattggagaaaggccagaatagtaagagagaaagcaaccacagctatgtttagattggggcaaagacctagctaatacaattcatgtatattcctacaactgtcgcctgggcacttctttattaaaagagggaatgaccaaggcataccaggcaatggcattatgggagcctcggaatttgcactgtcaggattcagaaagcacatatcaaaaggtgatcctatatgtgggcagggggtttgtctgtcctccattgctctgtcacaggtgctcagaatagtacctcaacttagcagaactcagaattctttttttttttttttttgatgcagactgcatgaggctttattaaagttgtttaacgagctaaccccatgttagctcgggccttccatccacccaccatggtggatggctaggaaagacagctcgaagcttctgcatagagatcttatagggcagcataaggggagtgtctaggggtgcgcacaggctcaggattggtgtgcctccaggcttggagaatttgccctgtgttgattggtcaactggttgttatggcccataggccctcccagggtggttgctatgctctgtgcgtcattgctgtgcacttgtccgtaaagcacacccagagccataaagcatagcaccaccagctaacttctgattggttccttgccacgaggcaggcgcctaacctcctagtgactaagacaaggtcagacaagcacgtgttcggctgttatggctgccgaaatggggagctggtcccttcattcccccattttttttttaaattccaatcatggaattgctgtctctcctgagtccccatgagggagtgagagatattggcatccccatgcaagggagtcccttctgacttagcatctcagccagggaaaatgggaggactcaggattcttaagagaatgaatgaaaagcaaaaaaaaaaaaaaaaaaaaaaaaaaaaaaaaaaaaaaaaaaaaaaaagacaaatggtgccgatatgcacatataggaaagtaagaaaatcaccaaaatgtaagtggtaaggcatttaaagtagaaaaagataatttgaattatgtttatggaaggaaactacaaagctagtgtttgtgtgtgtgtgtgtgtgcactcttgtgtatgagggtatgaatgtctgtgtgtgtgcacaagccaaagagtcagttatgagtccttctgtgtcgctcttccttgttctcttgaggtggagatctcattgagctataaaagccaggctggcaactatcaagcttcaaaatcttcctgatttcaccccctcccatagcatagcacagaggttataggcatgggcttttttggtttttgtttttggtagttactgaggatttgaactcagatgttcatgtagtcaaagcaagtgttcttatccacttagccatctctgcaatccctatagctaatattttatagtaacaaaactagtataaaacacatgggaataattcacttagcatgttgtctgtaaaatcaagtattgaaattgcaaggctattaaaaaggaaattatgttccattatgttccatttggagtcacagatgccaagtgaaagataactaatttcttactttagagtggctgccttggggcaatcaaaggacttttttttttctttctttgtgacattcccacaaagtcacagtttggaagctgtctgtcgtgtggtgggtacctccacgtctgtactttgatgaatctgtatgcaacagttgcccctttacttggagctcatgctacccatgttgagttctcacctccattttccagtattgctgaggacctgtgcagaactctccaccaaatgtcacgtccataggcggcatcctgttcttctggcccatgttttcactgccacgtggctctgtgatgctcaggctgttgaaagtatttcaagtagaggccaaatgatcttgctgaattaattttgtctgcagcactgagtataaaatccagggtcttgtgcatctagaccagtgcttaccactgagtcgcccagtttttgaagttcatctgccagtttctgaggttgatctgccagctctctggcttctagcataccttgtatgtaattctgttttaacttgtacaaccaccttgggctatttcctgtcccagtgcttggtgccagtatagcttggtttatgtaggaacttgactggaagtgttctgttgggaagcaatccctcggtatggatagaatgattgtgggaagacctcagacagtaaaacctccagtgttatttaaagttacctgtctatcaaagacagggcggagtcagtttcctgcccagtcaatagcatttattgggaaaatattctgtcatgtgtgaagtcttacctcttcttacgtcctgagtgtaatctttaataactgttgtagaccatattttcaattcctttatgatgcttcttcaaaactcaagagaatctgggagtgggggagaaaatccccaaacatggagcattaagggaactgggcatataacaaaatctaggcaccatatgagacttgggggggaaaaaaagaacttaaaaggtggatattacttagcatgcaactaggagggaccagtgagagacggagcacaaggaaataagtgtgaaagaatgtccaacatgcaaagctaacacaggcaggatggctgacgggctgtgggcacatcaacccgactgtcaagtagagagatggagcagacattccaggaagggagaagagatgacacaggccggggagtcgagcagaaccgagtgactggggaattccaaacagcccagctatgctgatcacagagagtttgtggggaacggaagaacagctcatgtcacttagatatgagttctggtattgagggtggagggtggcaactttaagagtatactggggtgactcttggcctggcccattttggggtgcactgaggccatgagagcaagtgctgtttatattggcaaagaactctgcagtctctctgtgaccctatatacactgcaagaggcagtcctctaggtttttgttttttatgcgtatggatgctttgccagcatgtatgtataccgtgtgtgtgtgtgtgtgtgtgtgtgtgtgtgtgtgtgtgtgtgtgcagtccccaaggaggccagaaaagggtgtgggattcctacaggttgtgagccactgtgcgggtgctaggaatcgaacccaggtagtccagaagagcagccaatgctcgtaactactgagccctttcctgctgagttcttaatttaattttgtgttaatgtgcacatgcctgtggatacacacgcatgtgtgtgcacatatatgtgtatatatatatatgtgtgtgtgtgtgtgtgtgtgtgtgtgtgtataggtcagaggccagcatgaggtatcttctatagttgcttctttggcttattttttttgagacagagtctgacagaacctggagctcatcaactgatgagcctggctggccagtgtgtccgggagatcctatcatcacggccccagcacggggaatgtgggcgctcaggtcttcacttttgcatgggaagcattttgctgactgaggcatcttccaatctcagcattagaggattttaatgttaatgtacgatgcgtgtatgtggtgtgtgaagagtgtgtgagtgtgtgtgtgtgtgtgtgtatgtgtgtgtgtgtgtgtgtgtgtgtgtgtgtgtgtgtgtgtgtgtgtgtgtgtgtgtgtgtgtgtgtgtgtgtgtgtgtgtgtgtgtgtgtgtgtgtgtgtgtgtgtgtgtgtgtgtgtgtgtgtgtgtgtgtgtgtgtgtgtgtgtgtgtgtgtgtgtatgtgtgtgtgtgtgtgtgtgtgtgtgtgtgagtgtgcatgtgtgaagtgtgtgtgtgtgtgtggtgtgtgaagagtgtgtgtgtgtgtgtgtgtgtgtgtggtgtgaagtgtgtgaagggtgtgtgtgtgtggtatgtggaaagagagagagagagagagagagagagagagagagtctgtgtgtctgtgaaggccagagggcatcctcaggtgtcactcctccggagttatccactttgttccccacacctagagctagccagccaggttaggctagccagtcaccccggtgactgggattttaagtgctcaccaccataccccaccttttatgtgggttctgggaactgaactccgttttcatgtttgtaaggcaagcactttaacccactgagttacttccctgggtcagccttatagttttttgtttgtttgtttggtggtttgagacagggtttctttgtgtagctttgtctgtcttggaacttgttccaggctgtacatcaggctggcttcgatctcacagagatccaactgcctctgcctccgagtgctgggataaaggggtgcgccaccacgcctggcagccttacagtttttaaagggcagggtttcttttctcttgaaacctttgtccattccacaatttgagtgatgaattttgacacacaatgacaatatgacttgctagccactggaatgtagccagggcccagattatttatgaaaagaaatgatgattctttcttagtgggcattagtcctattttgttttgttttgttcttgtaagctgggatcactttttatcacctgtccacactgtccacactgtcacttatctcgagtggttaaatgaaaaggtgtaagtttctcgttgaacccgaaacaaagtatgctctcaataactaattattgtccagccatctctgttagacattagatatattttaaattttaattaacttactgtgtgtgtggccagttgggaggggcacgtgtgccacagtacattagtggagctcagaggataactctggggagccagttctctctttctaccttggggggttctgggaacagaacttaggttgcctaccttgtaccacaataccctttacacactgagccatcctgctggccttggacattagatacttttaatgcacttgatataataaatctgtatttgtgaatttactcttaatgctgtctactctgtcacactgattgattctttgtttacaaatgactgtaatctgttcatgcttggttgtatgcttttaacatgtttctgactaaactcttttaaaagattatgatgtctactgctaggaatcgttaggtgaaaaatggcctctttgaacagtgtctgttgggcatgtgctactcagtaaatgtgtgctgggtccctctctccacaggataaataattaatagcttctaatcgaggcctttgactttccagcatttaaacctctttatcctcaatttgaactcatagagaagggctgtgcaaaagacatgtaatggaagccacttatataagtatacattcctcagtagctacacttgaaaactcaaaacagggccgaaattaattttaataatatattttgttagcttaatatataacaatatttgcattttaattgaaatccatgtccgtttatgagacatcttacatcttttattctcctactctttaaaacatgtgcacttggtacttatagtgcagcctaacacagtgctgttttgtatgtgtgtacacatgtgtgtgtgagagagagagacaggggagagagtatggtgttgtgtatgtgtgtgtgtcttattccttttgaaacagtgtctctcagtgacctggagctaagccaggctaagcatatccccaccccccaccccgctgctcccatcccccacacaacaggggcttacaggcagagtggccatacctgactttttacatgatgcttgggatttaaactcaggtctttgtgtttgcctatcaagaactcttctctgctgagtcacccccctccccagaccttaggtgatacatcttcaaatgaaatacttgatctggtttagactgcagaaagtttggagccgaaaaaaatagattccaacagttatagtctttctaaataactgaaaaatgttcaaattggtttctgaatttaagttatttatgataaaaatcaataaaaattaaatggacttgccaagtgctcaggagccaagggtagctagtgcccatagtactggccatagtactggccggtgtaggcattgaaaagtttcttccttggggctgatggccaacagcactctttagccactgtccatgtgagtttggtgcctggtagatcctcgtttcttttgtttagtcacaacttcagctttcttctgaaccgtttaaagcccagcactgtacagcagaagcttctaatcacaggccacatttcgttaatagcccgcaagaggatcgctaaaaccctaaaaatattccttttgccatttccctgttgtcatagctataagaagctgtacatgacaattttgcttgcgggcattttcatgattgaggactaaggttaaacagttttgatcctttatgccatttgagagcagaagagatcacaccggggcatataaaaccaaggttttttttttcctcctatgaaaagtgcattttcactatatactaagcccaggccttcgggtagtaccataaattaaacggcatttttaaaaggtagagttatttctcatctatcttattagatagaattataggtctgagttatttgaaaatgattctctcttaatgtagttccatagctatgaaacctgctcaggggttgtctcttaatattattaaacaataatcgctcagtttcaatatttcagcaaagaatagaagatgctgctgaaagagttttctgtatggaagccactgggcctggatcctgggctctcctttgagctctgtctctaattagccttatcccttacaggggtgagctcataggtcctgtgactggtgcaagattgaacacttctctacatagacattatcttattctgtgtctcactaacccgatgcagctatgatcatgaataagccaattcagcagaagtttgtaaaacataaacaaatatgcctgtcagggtcatcacaaggacaaggacacagataataggtaaataccctccagtcagtgaaatccaagctacagatggaagaaacaatgcccaaccccttggggcagagcaccatctcagatatagttgtaacgtaagggacttccgtgttagcagtgttcagtgtggctgctgtgtgagcagccttcaactgatcagatcagaaaagcacaaactcatgcctcagtatacctcggtgaagttagatttctgaagtgtgacattcccaggaacacagcatagttcaagccctggcctttcgattagttccaaagcctgggtgctacttgagtagtagagaccaccaaaaaggtcttgtggattattcatttgctttgtggaattgagaaatgtttacatcataggatgctagagaaataaatacgcagctggtgttatggaagtgactacacaccgagtgagaatatatatatatatatatatataatatatatatatatatatatatgcactccagatatgtgtttgctatttttaggcccatgttttaagggtcaagtgttaaggtttcagaaacaacttttaatgagtcaggataaaaaccatctggtgcaggaattcttccttcaaatggaggcattcgagaaagaaagaatttcccattgtcccaagattccagttcgaggttgaagaaagccgttcaacaaaatccatcaatcgtgtcccatctaactctcctcttatcttcatgaccatccacgaaggaatgtgtgtggaagggttattactggaaagaaaaggaatagcgagacggccaggcttttatgccagacgctaggtgtgcagaacatcagaataagggcaggaacacaccgcatcggagaaagtacgacacactcgatgtgcacaggaccagagagaggcaggtggatggcagggcgaggaggggggagtccggggccacaatcagagacagcctgctactctccccgaataaactggcccaagtgacacttccttgtatcccaggaagtgacgatgtagacaccgtgattcccaaggctcgcccactccagggatgctgtggggtgcggggagcccccttcttccacgcgctttctgggccggctccttacaggaggcttttgtgtcttttccccggtcctgaccctgaaccggcaccgacctcggggcagaaggggggctgaaagaagcctcaagggacgctagggaccaaaggggcgacaatttcgggatgatacccagtgcccctccagtgacacacacgaaacgcattgtaaagaagcgggctgggtggcgaggggggattgtgacttattcgcacccacacgccgtgcccccggcgcaggtttccaagccacacaagagtcaaaaccaagtctggagccggcggagcttccgcggggacagcccgatgggcgggtggggcgagtccctcctgaaagccggccgggctgggctggcggaggcggccccgcatccctaatgagggaatgaatggagagggctctcggctggcgcccgcccccccgccggcggccgccaacagcctctggtgccgcgccggccgctcgcgcgcgccggcgcgccggcggcgcgcgggcgggggcggcggcgggcggccggcgcggcggcggcggcggcgcggcggcggggcgctcacctgaggcggcgcgcggggggcgctgtcagggccgcgctcgccggcgccgcactgaggcagctccggggcgctcgcccgctctctagccgggccgcgccgggcccgtcgcgcccgccggcgtccccgcagcccggccccgcgtcctcgccacgccttcccgcccgcggcctgcgggagccgcgcgctccccggtgcggcctgctcgctctctcgctcgctccctcgctcatcccgccgcgtccgccgcgcccgctcgccggcctcgccgaagccctccgcggcccgcgacccgccggaccccccggcacgaccccgccgcccgcgcaagatgtcggcgcggacgccattgcccacggtgaacgagcgggacaccgagaacgtgagtccccggagcctccagcgcggccacctggacgagcccggcctgacccctaccccgtccttccctccccacgcggggaggccggggccgccctctgctcagggtggtcctgcccggggagtgggcagaggatggagggcagggggtgggcttccagggtggcttggtgacgaccccagcgttctgggctcccccacacccgagtgaatggatgcctggcgacagcccacgagccggccgaccctcttacaccgcggccgtcctgggatctttcagccctttgctttttgaggtctttgagtcctttgcaaacatacaccccaccaccaccaccaccaccaccacaccccacccgcactgccccatgactttgctttttgtaaaatcaggtccacatggggggggggggcatggacaccttagggataaagaaggcgatgaagtaaggagagagagagagagagagagagagagagagagagagagagagagagagagtgtgtgtgtgtgtgtgtgtgtatgtgtgtgcgtgtgcgtgtctttatatcactgtgatactctcagtagtgatgactggaggaatttcactcgcagcttctgtagccccagggtgagagagaaaatgttttaaagccccacgaagccgacctgcttctggtcctcaagtcccactgttcatgactcagggacaggttttaagtacccctcctccttggagtgtcaccaggtacaccagggaggatttttttttcctgtgtctgatcaatttgccctcaggggtttgttgctgttgttgtttaatttttaaaaatcaaggttgagatgttcttggtattgaactcttaaaaactaagagaacgaggccagttgtattttcaccttctgaaaagtacaatcgtctgtgttcacgtgtgagaaagtgaaaaggtgtctctctgtcactgttgcaaagtcccccctccacccctccccccaggctccagagggtctggtctgattgcccaacaagttttaaggagctagggggttctaggttttggttggctgcccagagctgcctggttgtctactgacctcatccgttctccagagcttactgtactagtgccttcatggggaggtaaagtaaaaaccctgaagggctctggtgttctgagacaaaagatggcagaggacagacagggtagctcactttttgaaatgttgaaggagagacataaacacggtgtttcatcgagagattcggggatcacagaaatttactataattaattgaaggggaaagaatgaattctaccaagaccgttgttagaagagctagggagatgttgggtatgctttgtcctctcctgtgtcatacatttaaagccgtaaagacaccgagactgtcaccactgagactgtcaccatcatacattacagcttaatttgcatcataactgttgttttagaactgggattgctgcataattttcattggtaggttgaagaaaaaaggtaaagaattcagtgcaatagatttttaaagcccaagaattaatttcaaataaccctgcgattcatgagtgaggatgagaagccagacagatgatgacctttgtttttgttcgtgatttctgtgtgtgtgtgtgtgtgttagcctaggagtggcaaagcatcttgtttcattttttgtcttgggtttttgaccaccacacctcttttcaggctggtaggatagcgtggctttatacagacatgagatggcattgtagaaacacccagcaaggaactgtactgcacacggcttcacatgtaagaacaaaagagcagcaagggtacttcagagctaagcagtgttagcgtgatgagttttgttgtgccttctgttgtacatttggggagttcgtgtgccttgtttctgatgtgttctttcagagactctgcacggtcttgtttctacccgggaatgtagctgtctctccatttagcttactttatgtacatcctaattatctcccgattgcagtggaaaatatctactctgctatggctgttaattaatcaatgagtctgcacttaactgtgttttgagctgaaagggaatgcagaagagcctaagacagccccccccacacactaagagctgagggaagagataaatgcattcccaaatactgtacagtagaggactctgtagctaggtctaaattggcttataagtcttccaggtgtttatcaaagaggccaccactggaggctgttaaatgaccactgaagtcataaatggcactatccatgttccttacctcctaggtctatggagtatttaagaccatagccaagacccttagaaatgaaaataaacaaatacagtaattttaaaaaaacagtattatattgaaggtaacatttctttttttatttttttaagtgtgcattggtgttttgcctgcatgtatgtctgtgtgagtgtccagtctcctggaactggagttctagatagcagggactaccgtgtggctgctggaatgggccatctctccagcccccataaacatttacttacacacgcacacacacacacacacacacacacacacacacacctaccttgcatatgacatattttatgtccttgggaatatacaatatctaatcttttcccatgtcatggatgcatgttaagttttaaattccagaaaggggattgtgaccctggtgtctaacctccttccgtgtgcgggagagaaggaattgctcttggtgaacgttcagtgtgctctgggagcagttttcttagatggtggtttgtgtgcactttggtgataggcttcacctggctaaaatataacaggaaacagtgatcctttgaaggcagtaaacacttcagtaggtgaggtagaaaagatacgttacaaagtatagagttgcaaaatgtgtttgatttttaagttgtaaagagcaagtctaggaagatagaaacatgtttgaaaaacttgtttatcttttcttcttttttttttcctgtcaggtcattcttgaataattccagtatggatttaggaattgtattaaaatgtattaataaatatgtttctctaagtgttttggaaaatgcaatgcccgggctggttttctgtgttgaaaacgatgctgtgtccttattagagatgagtgtaaagaaagtcagtgtgattatttcttgggatcccttaaaattacaagtttaggtaggttcaaaagctttgactaaatcttttgcggctgtgtctttccatagactagacctttaagtggcaactgtaatgagcccctacagtaactcaggtggccagcagcagcagcaggctgctcagaggctaccattatgtacagacaagtggactgcgcacattacactacccgtggctctgctcagggctccctgcgtgagtccagtacctgtcctgtctcagtgtacttgctgcctcgcttgtctcctctgtgttgtccttgcctggctcagtgactaatgtatataagagatcagtgctgtgacattcccttttggatcagtttgtttattatcaaacaaagggtagacatcacaatacactgcccagctaaaggcctcagatggtcaaatgacctgcccaaggtcataataggttctgacctcttactctgttgctctactctggctattgcttctggggggtggtttgtttagtttcgacttagagatttaaaaagaacacacatgtcccatatgggaggaagaacagggtatgcttttcttaactacttctggtcctttactacttagttgcctgcagtgtcctgccctgcccccttatcacacacttataaatcctttgtggcttggcttgcagctttcggcaggactcccgagattactgcagccgcccttgctcacttttgtagctaccactggtgaattgtgtgaagcccaggctcatgatctccagagtgggcatccagacagacttttgactgtcatttctctatcttgatgctattattcaatcttgttttgttgccctccccctttttgaatgttgtaggcaggtaccatgacatgaatgtagaggtcagaggataactttgaggagtctgttctctcctcccactgtgaattgcaaggattagactgtcattttcagtggcaagtgctgttacagccccctagccttctcattagccttctgtgttttctgaaagcctacaatgtgcacagttagctattttgcttgatttttcaaataacagccctcattaccggtgtgtatctgaggctttccattggagctggtgttctttcttatgatgaacatccttggaggttcttttggtgaacccggacatggtggcataagcttgtaaactcagcactcaggaggctgaggcaggaggatcccaagtttgagagtaagaccctgtctcaaaaggagaaagttgttttggttcatgatagccatttgtaattgtggtgttttgtttatggagacagggtctcactatgtagccccggcgatcactcacagagatcacctgcttctgtcctgagtgctggcatttaatgtgtgagccactattcctggcttgtaaattttttaaaatctgaaaatagtttgcctttattattggaagacagctttgctcagtctgtaactctagatgttggtttaatttctttaaggggtcagaaaattgtatcccaatgtctattgatcacactgtttctggtagaagttgtctgataactggcaggctgtcatcttttcttttttaattaaaatataattagatcatttctcccttcccttttcttcctccccatgcacgcatcccctcaaattcatggaatccttttgattattgttctatacacatacatacatatgcatgttgttacatgcatacatgaatgtgtgtgtgtgtgtgtgtgtgtgtgtgtgtgcccatatataaatacaacatgctttgtccattttgtgttacttatgtgtgtatgatttcaggactggcctcttggtactgaatgccaatggggggactcttccctggggaagactatttctttctctctcagcagtccttatttgccttagtcatttgtttggggttagggccctgtgagatttctccctgctatattggcatgtctattggtgtctgtctctttatggttctcttttggtgttggagttttactgtagtatatttaggtgtaggtttattttcatcctgtttgcatgttttcataacttctgggtgcctctcaactattattttttttcaatcttttcttcgggtacatctatgtcttcctttcttacactcacattggctccccagatgctttaccttgtagatggagtttctttcccagctggtcccacagctgtgtagccccaaatgaacacacagaggcacctattaattataaactgtttggctgatggctcaggcttcttactggctagttctcttttaattattaacccataactattaatctatgtatttctacatggccttatcttgctggagaaggctccaacatgttactcctttagtggctacatgacatctctcaggggcctctctctgcatcctctccccagccttctcctcatctggtagccccacctatacttcctgcctggctgctggccaatcagagttttattcaccaaccaataagagaaacatatatacagaagggcatcccccatcattatcatcttcatttttcttgctagttcattgtttctaaatgatgggctgtatatttgttaagttctgcctttgtagattcctaactttgatcagtttagaaatgtgtccaccatgatttctctgtgccttggcttagctctgttctctcttgtgtctctggtctctgtcagctctgatgaactttcattctgtctgccctccatatgtcttaaccccaattcatgctttttttttctacctccttgcttctttgtagtacaatctgtagtgcaatctgtagtgcagttactctgtgtaatgtttagataagtctgttttcaattgtatttaaatggctcccaacccatctgttgatttcttttaattgtgttttaaaacacctttcaggagagagatctgcttttgtgaatctttaggtttgtagtatagtatcattactgtaaacagtgttagccaaatagcttgtaattttatgttgcaggactgaaactttgcacctaccggatagtgactctctcttctttctttcctccagctcctggcaaatactaacattgctttgatggttttaattactttactcataaaaatatagtcatgtagtatttatctttttgtggttggtgtatttcattttccacagtgtccataaggttcatctgtgtttcagtatatgacaaaatgtctttctttttatgaatgaataatattctgttgtgagtatatagtgtattttatttattcagtcatctattgatggatatgtattttgtttcttctagcataaatgtttcaaaaaacattgaaatgaaatatctcttggagattctgattcccgttcttttgcataagtactaagacgtggagtggattggttacaagttgtattcttaatttgcaaaggaacttccatgttgtttttcatagatactcttaactttttatatcttcaacaacggtgcacaagttctgttttctctatccttcagctcagaattctggcaactcttgttattttggttttgatgatcacagtcctgggtagggatgtatgtagctcagtggcccttgcttagcatgtgcagggccctgggttcagttctcagaactatagacaaaacactgcttgataacagccaccctaacaggtggtactttgttgtggttttgatgatttgttttttcatgattaacaatgttgagcttattttcttattttctttggcgatttgtttgtagcatttaggaaaatgtctattcaagtcttgtgcatattctaaaatcaggttgtttacctgtttgctattgagtgttaggagttcctgacatattttggatactaactctacatgagcgacatggcttgtagatattttctcccattttttttcaaattatatatgtatatgtatatgtatatatttatatttatataaaaaggccagtaatggcagtatgttatgcatcaatagcagcaacagcttttccaggttctgcagtcatttgaacaaaactgtagagacatccagcactatccatttaaaaaaaaaaaagtaaaaatcaaaatcccagaaaaacagcacagttctgttactcttgtggtacctggcaccattttttttttttttaaattagcttctcaatcatcatctggaaggaaaccattctgagcaacatcattaaaaacagttctgataaagcacggtcactactatggatcataaagcaggtccacataggagtgagtacatgtcatgtttgtccttttatgattgagttacctcgatcagaatggtttcttcaagttattttctcccattttgtaggtcctctttcctctgttttccctgtagtctttgctctagttttcataatctacttttactttgaaatccaggaaatcattgccaagacttacatcataaagctttttttctgacattttcttctaggagttctgtagttcaagcgttagggttaaacctggaatctgttttgagcctgtgttacaggatgagtgtctagttccactctgtccttgttgattgtttagggcatccagaggctttgtggccctttatgaatcataggatgctgtcttaatcaggtttctattgctgtgaagagacaccttgaccacagcaactacataaaagaaagacatttaattgggagaagacatctaattggggtggctgacattttcagaggtttagtccattttcatcgtggtgcaatgtgttggcatgcaggcagacatggtgctagcaagagctgagagtccttacatcttgagtcacaggcagcaggaagtggtctgtctcatgggtgtggtttgagcatatctgagacctcaaaacctgcctccacagtgacatactccttcgaaaagaccatacctactccaataaggtcacatctcttaatagtgccactccctatgagactatatgggggccaattacattcagactgccacagatgttttctatttctacaaaaacatgcggctgaattttgatagggattataataaatctatagattgtttaggtagtatggacattttgactgttgatttttctaatctatgaacatggttgtctttccattttttttttaatttcttttggtaatattttacttttttgattaagtttattccaaaatagtttgttctttttggtattttaaaatttggcctgttttctgattttttttccagatagttccttgttagtgatagatacacacctgagtgtgtgtgtgtgtgtgtgtgtcggggggtgatttttgacctgaaacgtttttgcaattgtatgttaagtttaacaggtttttgtgggacatatgtgggggttgcatttaagattgtctcatctacgcagagagatatttttactccttccttcctaatttgaataccttttcattttcttgatattatgaattgtttgggctaagagttccagaactatgttgaatagaagtggtgaaggtggtcatttgcccttgtttctgatcctagaggaagtcttcgtttgttgtgtcctaccattgactgctgcatgcgctacgggcttctcacaagtgatctgtagtacattgagataattctctgtcatccattcattgggtgttgcactggatctcgcctaacgcaaatacctacatataaaatctgtatctacaggaattattatagcattttaattgtttttgtgttgataagttgtgtaccacactgattttatatattgaaacatttttgtatgtcagttgtgaactatggtataagacatttaacatgctatggacttggatttgctcgttttccattgcttgtcttgagaacttctgtgcctgtttatagtcactaggtgtgctggtccttggctttctttttttttttttttttcttaaatactttcctagtctttggtatcagtgtaatgttggatttgcaaattagttggatagtattttctcctcttcagtttttttggagagcttggaaagatgggtgtcaatcttctttaaacgtttgctgacttcatcagtgaaatcatctgctctcaacctttctttattggaaggtttctgatcactgaattagagttctccagaggaatatatttaattccagcaagttgtttgctttccagtccttctgttctttacttctggtttcacaccattagagttggaaaaaaatacatggtatgatattaaccttaaatttgtgctttgtttttattttatgtgtgtgtgtgtgtgtgtgtgcttgcatctctctctctctctctctctctctctctctctctctctctctctgtgtgtgtgtgtgtgtgtgtgtgtgtgtgtgtgtgtgtgtgtgtgtgtgatgttacccatcatggagaatgttctgtgtgtaattgagaagaatgtatacggtactgctgttggcatatgttttgttgggtttttgaaacagtgtctcaccctgtagcccaggctgttctcaaacttgcattcctcccaagtgttaggattatagctttttctgtgtccatttggtctgtgatgttgttcaagtcctcgtttctgtattggtcttctgtctggatgttgcatccattactgcatgtagagtagtaaaatctgttactgttgtgttgctgtctacttttgcctctggctcactgtcaatatttgttttatacatttatgtcttctgatgttgagcacatatatttatgtaattgttacatcttctttatttgattgttctgttattatgtgatgtccttccttgtcttctatggcagtttttaaaattctgttttatctggtataaatatggaaatccctgctctctttcagtcactgcttgaatgcaatcgttttctgtcctctgactttcggccttaaagtaaagtaaaagtaaagctggactcatgtcgacagcatctagctggatctttgtctttattgaagtgtttgatcctttgcataatgtaataaagacgggtattacgataaatttttctgccaaaagccgccagagccccaccgccacgtgtgagctttacgccagctgcccacatgagtcagggcccaaatgaatacacagaaacttgtattaggtacagtgctgcttggccaatgactaggattctcatctgttagctcagtcttaattatcataaatctatatattttataaaacttatcttattggacgccttattggcatcccttcttgccggtggagcacattgtgccgctggagcaggagcagaggggaaaagagggatgcttcctgtttttccttctttaaatatgagtctccttgctatgtcacttcctgcctggatcaccacttctctactacatttcccagaatcctctttgactcctagtcccgtctaacttgctgtctcattggccaaacagtattttattcaacaatcaataagataaacatacacagaagtactttccccatcatctactcttttctgtctaaataaaaagaagagtaacttatcttttataataactgaagaaacctataaccataactatctgtcttcaactctatcaaagaccacagaaggataatagacatctcgctacctggacagtcacccaaagttcctctgtaacgttggggcatccatcttcagcctataggccacagtgtgtctagcacacttctccattttaacaggaatccttcagtactgtcttgttttgtaagttcagcagtcactttcttgtgggtcctgcatgtccagtttatacagcaacaaacagtccaggcaagagcagtttcttgcccaaatggctaatcttgccatgtagaaagcaaactccataacgagtttcttcgatgcccatcctcctttctgaggtaattggtgtgccaggagcagttgtgtctcactgccaagaaaaaccctaaaccatttaaatgccatatttctgtaggtctttgaaaggtttgaagaatacctatccatttcaaatacatctctgtatatctagaaaacctaactaacctaattataagttctgactattataggtaaaagatctgtataaacacaatacctaaacaagaggagacatatacctatcacaaaattgaccttaaagttgtaccaataaatgaaaatctattcaaagtattcattcctatatcctattcccctttttttctttaaaaaattgactatgctcattatcatttatgactaaccctatttaaatgaaaacaaacatttataaacaatatttggggatttgggcatcgttccttctatactgcttcctgctgattcggggcgatgttcatataccatggggatcatgataaaacatagaaacctgaccaagtccttgtttttgtagtctgtaaggctgtatcatctcagcttcagggggtcttgcttgatcaaaccgtattagtctggaaggaatcaacagcttttgattttctgtggaaatacaagtaaaatctttacttctaagtagcctgtccttagacttaaattttgaagtcaaagcatttttaaaatgtataagttggattaatttagcagcatttataatcaaatgtattttagcagcagtaaatctttcctcggcaatcaaacaatttaaagacaacagtatggcatttagtatccagattctctgtgtatttttcatctctaggtggcttttttactattctacttttacttccttttgtttctctttttctgaggcagggtttctctgtggaaatccgcctgcctctgcttcctttagcaaatcctaccggcgttggccaccacaatcggctactctatttcctcctgttactttttctctcacaagcctacatatatttttaaatgtagtgtaaacctttagaggtttttctttatctggatctgtctttatcatctcagaggtgctgagtacaatgcccaagagcgccaggaagtcgagagcatatggaagctgctcccatgcctctcagcagcctgacagggcaggctgtggtggcaggtttccctcttcctctgggaaccttggggcatggagtcatccggctcaccgacaccagatgggtgctgttttaagtgttctgtcaggcttgtctatctgtcttgctttttgttgctcctttcctgtgtgtctcattggctttcacagtgacatttatggtataccactgtcagcatctaagcccaggccatcagcattgaccccacagctcagtcttccttctgagatttcccttagtcctctgtctttgaaatagtctcctagtccttgctaatatttttgtgatttcattttcttaaacatttactacgtaggcatttacatcctgtttctggaaaatttgtcatctgatgctccttgatgtttaatttattgtttgtatccatgaatgtctgtcatgtggtgtttttgtttctggtttgttgtttttgttttcctgtctctgtctctctctgtctctctctgtctctctctgtctctctctgtctctctctctctctctctctctctctctctctctctctctctctctctctctctctctctctctgtgtgtgtgtgtgtgtgtgtgtgtgtgtgtgtaacttgaagttagagaatgacttcccacagagaggggctgtttctgctccaatgggaacctgttaacgtgggacattcttgtctactcagggcttcagggagctgtggcttcagctattaatcttctggtgggttcaaggcttacagtttgaccccagggcaatcccgtcttttgtggtcactttctgctggtctgtctttcttttttagatgtctgtttttattttgcctttggatgtttctctttcttccagtttcacaatgcattaaaagtatgtgtttcctgtccccccagggccttcacagtatcttacctaagagaaagaagcctgaaattaggcttttgggaaagcttcatatagttcaggaacctaaaaatgtgtcacatgtgagactcttctacctgtatacttaaaaaaatgtctacaatttttgttttcaagtctttcgtttcaaagcttttaacttaattaaatttgcgctttgacagtttcatacctgtatgtaacgcattctgattccctcactttctgccctctctagtctcctcccacccatcagatcctctgctccctacagaacactttcctgcattcgtgccttctgtgtggcaactcactgaaccttaaggaggactgggcatgcgcccctgggttcacagtcaccagtggacacacagctgaagacaatgacttcccccttgcagaatttccagtaatcgagcagagaagggtagggcctggtgagcccccctccatccataactgactgctggcagggtcggccttgtaaagctcagcacaggtaacaggaggtgcagggagggctgtatctagaatatggcatttcacagcccttctccccatctcctggttcttaaattctttctgcttcctcttcctctatccttcttgaaccttggagggggctcatttccaaaaatcataattgattttggaaaccatttgttgtagttattaaatgactggctttcaaaagttgccacttgtcatcaaggggggtagaagtttgctagcagagctttcatagacatttccacaaattcagagatggagtaaaatctgaataacataatgaaattaatgtaattaaatccacggctatgagatgctttctcattgaaatcaggtgttactgtacagtgtgcttacagctttctgtccttcagtcttctgtatcatgttactaagcctagatgtcacaccgggaacaattttcattgtgtactatcacattgtttactaaccacagaaaagcttgcactattagagatcagtacattctgagttttttattcttcattttattgttctgttttctagtgcgcataatctgtaagtgcttcatctgtagtttgtggtccttgggctacagtgtagaggtccttgggctatggtgttgtagaggttcttcagctatggcataaaggtgatgctgtgaccattattggagtttagccttgctctagacttgcctgtggtcagaactctttcttcctaaatgaagtggtgctgcacatcagtgttgcttctgtatatttcctaaattagtatttttctatattcttctgttcatgattttagaaccaaagtctattttcatttactatcaatataatgagtgtatacggggcagatttttcctaattcacattccctaatcgctctcaacaccatcatgtgttctcagaggttttagattaaggcctaggaatacttttcctcagactcctgctgtaggtatctactaaaaagcactgatttatgtgacgacggtggtcacacaggtgccttctttcagcagaggcttatcgttagtggcttcagggagcagaatggcaaaaatgatgactagcccttcataagcagtgacagcaatggaatataccaaggattgtctggcttgggggtaatacgggagatgcatgaaacacctacattgaagtggttaaggaagaatccacatcctttaggtgctgagccattatgagactggacatgacagggaattaacaaaaccagacacaccctaaacaataggagagccactctgtgcccttggttctaggctgatactgtgccaaccatcttatttagtttaaagagtaaacaagcctaggcactgtccagaattttcatgagctgctggtaaagactatggtaacagggttagcatggctgtcttcttcctggggtcagaggtgcaggtttcaccacctgaaagagatttcttttatttccttttctattcacctcatcataattgaaagcggttgggaggcaaaagcaatgaaacctgaaccctgctctggagggactcagagcccaaagggagcggacacagaaagttacagtaccctgtcacctgactgaggagaaaggaaacaaaggctgctggagatggaccaggactcttgccaggctactgtgcaagtcaccctggtgggaaggagggacggggtaggaggagagccttagtctttagagagggacaggactgggcagagagtcgagggccccttaacaagacaagagctagtccaggggccaccccaaccctgggagagggtaagttcaaggttagcttgattagacttgcagacttggagcctctgcgctttacaaacaccccagacttcaaacccagcaggctgctttgtcaggccatggagcttttactgtcccatttacagacaccatcactagcaagttggacttactggaaagcaggctcagggaagtgccggtgtctgcggcaggaccttgaccactgtaatcgggcttctccaagccgcctcagtgaggccttctgcatcagtcctctacctgctggcgggtctcaggcaagggtctcccttgggtatagtgagacatgtgttggctatctgatggattagtgcatgctctcctttgtgacactcttagtcatcttccagctcctcagcctcctgttgagcatggactctcttctctattacagtattgaagcaatctttgaataaagtcttcctctctgtgttttctttttaaaaatcatttcttttatttttgagattataataaaattgcaccatttccccctctgtcctctcttcaaactctcctatatagtctgcattattctctttgaaatacatggactctttttcataaattgctgttatatttgcacacacacacacacacacacacacacacacacacacacacacacactcctaactatggcctgtataatgttacttgcatgtgtgttttcggggctgaccatttggtattagataaaccattggtgtgcttttccctggggaagacttattttaagaaacatcagaatagaacatatttttctttgccacgaattaagagaagattcccattttatactgaaatcccaagtcagtgtcagcatgatggtgtgtactaggagcaaccattggtcacttagcgcccagaaggtggtttctgtggactcagggtgaagacacaccaacagagggggcagggagaagggctgacctgagctgaggcagatgatgcatggtcagtctttgtgttcttagccagtgttgacccaggcagcctacggaggagaataatttacctgctgattttcttctgattggacttgtggttatagctttatctcctacttcagttgctttaagagtggcatcattgctttgcaaggacagtttcccaatccgagtgtaaccgagcctagaaaagaattcagaaagctgtgatgcaaaggaaccatcagctagcttgtctccgataagtcactgcagccgtcctcgttggctctttctcgtcctctcatttaggtccatacttcggaaccacctgcactccacagaaatgatgcacaactgagtaacagtcctaataaatgtcattggtccaactagatttcttacgtttgattatgttggaatatcacaaatgagaaaccagtggctggttgtttaaactggagaattggtgttggcgatggaacccagggcctcagtcatgctatgttctctttactgagcaacaccatagtcttctaataaattctgaactaccagtgcccaaaagacatccagggaagggatgctggaatacagaaagctgctccaccttcccacctaccctcttcaccaagaggggagaaaaaacaagatggaggaaaaacatgtcaaggaggaggttgctctcttcccaggatccagtcttagcgtgccttgctgattctgctgtggctgtgatctgtgacaggctttcaaactgaactgtaacttttgccagactgttctctatgtactccttgaggtcaagacctcagggttgctgcgccagccaagcagtggtgaccagttttcagagctgcccttgctgcagaagcaaccaggagagcgctcactcccatccatgcatgcatgagtgctgtgtacagcaaccaggagagtgctctgtcctattcatgcatgcatgagtgctgtgtacagcaaccaggagagtgctcactcccatccatgcatgcatgagtgctgtgtacagcaaccaggagagtgctcactcctatccatacatgcatgagtgctgtgtacagcaaccaggagagtgctcgctcccatcaattcatgcatgagtgctgtgtacagcaccaggagagtgctcgctcccatccatgcatgcatgagtgctgtgtgcagcaaccacagagtgctctgtcccattcatgcatgcatgagtgctgtgtacagcaaccaggagagtgctctgtcccattcatgcatgcatgagtgctgtgtacagcaaccaggagagtgctcactcccattcatgcatgcatgagtgctgtgtgcagcaaccaggagagtgctcactcccattcatgcatgcatgagtgctgtgtacagcacagctgtcctggaaatgcatgcaattagtatataatcatcttctgcaaataaagggttataaaatctgaggtagtgttgggtggacttttttattttaatacagggggcattgcagctctgtacatgtcacagaacatatatggaggtcataaaacaatttgtgggaggcggttctttccaccatttgggtcttgggggttgcactcaggttatcaggcttggcagcaggtgtctttacctgttgtgccatctcaacagccctagacacaatactcacttttaacgttctggtcattttttgtgaacttccaaggcatgctggatagagacttctctcactgtgttcacgtatgtagttaaagccaccagctaagattccaggtcactaaaaaatgatgttcatatttaagttgacataactagtaacttagggaataattactggatttgttaggtttacttaatgtaactgaattgaagatcatagaataaggttttggctgctgtagtgctaatcaaatgtaataatttaaagaaaaaacacctacagtttctggtatgaatctgctgtaacactttggttcttgtgggaataaaagccctaggaagtttgcaaaggaatttaacaccatatttttagaattgatttaggcagatgtgttcgtttattctctggagactccgttgtataaacgtcactgtctcctggcaggctgtggtgagtgaaggcctctcagaggaatgatttgctgagtagaggagtagctgggagaggagatcctctaaaatgaaaacttaccttagctcctccctgtgctcctggtgtctgtttgtagcctggtgtgtcagaaggaccaggacgaatgtctttctgtaatcgcttggtctataaaagccaaacccaggtttggatccccattctgccttttgtgagctgtaacatggtgaagtcatttcttttatgccactggcttacggggaatcagagagcctgcctcctgggctgattaaacacatacactcttctttgttcagtgcctggcaccttatagaaactaagctgctagctgctgccgttggtgttacagttactacactgagataaaggctgaaaaatgtgattatgccaacatttcactgtcctctctctactagattatgcatgaccttcattaaaaaaaattccagttttgcatcttggatttatattactttttatatcaaaaaagtattaaatttataatgtgaaccgtaactttctggtttgctggtgcttccatttgaatataagagagccagagtggaagttgaactgtctgcaggtggctggatcagggaattgaagctctctacagagcaggaaggttgtcaagggacaaggatgtcttgggtgagaatgggtgtgcttgtggtgatgtgtgacgcttacgagcccacactttataggacaaacacctctgtttattatcctctgatccatctataaggggtgtgactttgggcatatttccttctctgaggacaaggcacatctgcctggatgtggttcatcaggcctgtgtaacatactttgcaatagtaagtactcaatatacagaaaccagagaaccagaaccaaagtgaagaaatccacagttactcggtcagaatacctgttctctgcccccaaatccatgttttcttcatgcttgccattttctacttttcttcatgtagatcatattgttggggccgtgtgcaaatgtatttggattgattactgctttaaacatgcttgtagatccctcctgaaacgtcattgacttccctggacccggatgtaaagacagacagggcacttacaggttaaggctaattttgatagtcatgtgtgtactagaacctgatgtttttctcctctttctgaatcatcatgtttacatttttaccctttagggacttttggtaataacgtggtgaacaagatttggggactgttttaagaaactgtttatttgtattttgtatatatcttgcttcttaaggaaaactatttctcctctattttctaaaaataatgcttgaagatttttttaactaggaaatttttttagataggatttatttcatcttagtcaagcttatataatagcataatagtgagttaaattagtagaaatataatcccacctggtcgacatagttccaggacagccagaactatgtataatgactttgtctgaaaaatgtatatatatatctcccgcattcagccagcttcctcgaagtaagcacatgagagtttaacatctcttaatgcattgcaattcagaatttagggaagtggggtcctgtgggtaatatggagtaagattttcaccgtggggttgtgcatacgtggctgtgggaggtggctaagcagtctgtgtatagttgctgcttcacagtcggaaattcggtggttaaagtccacagggccacgcgtctgaaaggaaagatgaagaatgtgagggagaggaagaacaggggaggctctgccaggacaccctggagcacaggtctgcccactgctctgtgtgtcctaaccccgaggcagcccataagagggagctggggcgctgtttggcctagccactgctccgtgcctgtatgacaagcctgcacatcagctgtgtcagcctgtgtactgacctttaggccatacgaacgccactattttcatttctaccttccaaatcttgtgcaggtttctcctgtggccaattctaacccaggacccagggaagagggaattctaggaaacagagttcttactttgctcagccatcacactagaaaccacaacagcctatccactgtcaacttggccatcctttgaaagaatgcaagatctctatgtttctctaaaccagatttaaattgcaaataaagacatcagcgagattatttttttgcctgccatgatgcaagacatcctagttcttccctcaaagaaagataggaaagccttcatccatctttgggtgatgttcagttgtccttcaatcaccccgtccttttggtgctgatgttagcacttgaatttggatgatagggaaatgggaaggagaatttaagaaagaaaggaaagaatctgctaatatatatccagatacatttatagaatatgtttgcaaaccttccactgggactgtatttcctttggcctcagcagataatctgctgcattacctggggaggttagcaaactccttcctcaggggtctggcacatcagaagtcttgcttgtcttgacttgattccgttttccatccacttagctcaggacttgacagcagaaagagggccctggagaagctgcttcatgtcagatgtactaaccctcttgcctgccacagtagcgactcagcttcctcttgaccatcagcaatagccactccagctagtacagtaaccgagaaatctcagctgtaggtcagtgcccattactgtggcacctgacagaaacttccttcctgtcccagccgtaacaacccaaagctgcagtggtctgggagggtgatcactccaggatcggcccctggtactacgacttagctcttgcctgtggatgctggccacaggacacacggcatcctctttcgattacagatttggagtgtattttgtatccgtagatattattgcagccctgcaaggttttgtcaccaagctgatgttgtaacagaatcttcaggaggccattccagtatcccatcaagccagctgcatcagagttacaaattggggaatgtagtgagactggcggtttctccaaacatgagctcattttcatgcttcatctgctgcagaccacatttcatgcttaaaagcagggctgtcgtattgagagcttactttacatgtcttccagcaggggatttgtaataatactaacacaagtccttatctacagaacatgtctattttgtgacagtgatgagggcagataaaggcctgttgcagcccagtgatgattggtgtgccaacatgtcactcactgacactgtgcccccaccccatcccacgtatggtgctgggtgtggagccagtattgttctatgcagtcgacagattggcgttgggaaatgttagtctgtgttgctaggccctcacaaccttcatccctgttaactgggctccttggtcctgaaccattgatggagaatgggtggctgggaaagagggtgctgatgtacactgggtatgctttgtttctgaagactgatgctgatgggacacaggcatgtccatgtgttcatatacttgcttttcataaatttaacatcgttttacttataagtctgaatggtacctgggtggtctgtggtcagctgatcagactctgctgctctctagtagcaaaccaggaactgcccgtcgtaatcctgaaagacagtccataatgccatcattcagatagtgacttctctacagcctaaaacccccaaatatggtctttgaagattacaatgccaaacattgaaatccgaaaagctgaaatccccaaaactgcctttcctattggggaaccttaaggataacaggagtagaaataacagttctagggaagagctgctgtccatcaaatgtagaacgtcagggtgcagttagtgactgggagcatcagctgttgctgggctgtggtgtccgcagtgtgcagtcagctgtccatgctttgtgtgtcagtattcttcggctttggctttctcgaggtagtttttgctccactgtcctaagttgttggctcggtgttttttttttacaatttgcggtgctgtgtattgcgtctttacgtcatttccagggctggacacataaatcctgtgaagttacttgtagaattctcatttgtctttttcctaatacttttgtttttgtaaatttaacatcttgacagtacattttcataatgctgactttgtgtgcaagcagtgtgtgtatcaaaagcgtgggagcttcctcagcaaacaaaaggtgtcctgtttgtcatctgcctttgtgaaagagaaatatcctgagctctagatgccttgggcccattgcaggtttcattggatctcatgaacacagtctgtctgttctggtgtttcagatagatgtggttataaaactggtccacagtcaccggtggcatggtatgtttcacaccagtttatcaataggactcagctactcacagctgttatgctcacaagtaactatcactgctgtacgagagtgcttatgcactcaaaactgtgtgtgctaatactgccttttgcatgtgtagcgtggtctgtgaacgctgtgtgtgtttgtgtgcacgcgtgcatgagtgtgcatgtggaggtcagaggttgcagcccatccttctctattgctccccaccgtatcttctgagacagatttgtcactgaagccagcacccactgatgagttagagtgctggccagtgagcccttgggatctgcctgtctccacctcccagtgccgggattacaggtgcacatggccatggttggatttctctgtggatgcctggggatctgaaccaaggcctcagtacttaactgctaacactatgcactgagctctctctccccacccagtgtagtcttttaaaaatgcttctcatataaatcttctctcattgtaaataaatgtcatttggagaaaaaaaaacacatttttccagaattatatttctaggattttgatattttgagaatttagtctttaggaatattgatcttttaggattgcaacatttatttgggagggttatagcccacacctcagtgcttgcttgctaacagagtacaaaagatagtggacctttgctctaaaagcccacagttcattcactgaaagagcctgcaaatgctactaacatttgcttgaagccccgtccagacttgaggttcaggaccagagcgttgtcatgacagcccaggcctgtcatgagtgctgctgtttcagccccctttggagactggcaggctttggattacctgcagtgtaggtgtgtgtagtctttgcacggcgagtatggtgcctgcttggggcagacaccaacgtgcaaatgtagctctttgctcttcatcctgtgcagaaatgtttccacgtgtgcctgacttccagactctagggactttgctgcagacaggcctctgggtttctgtggggtgcccttccaccctctggcatgtgtcttacttgtttaccagacccagtcagcatactggcttggcaaacggcccggtgtgatgtgttaggaaaaggagtcagtggtccttggttggaggaaattttgttatcctaaggaatatttgttaatgtttggggacatttttgttattacacatacaagtggggaactactgtcatctagtgggtagtagccagatgccctgcaaagcatcctgccctagaaggcacgggcagtttcctgtaaggatggcctgctttgaagcccctgcagagctgaggttggataaccctggactgggtggtggtgatgtgaaggctggaggtgtgcagcagtggcgagggcgaccctgagaggagaaagaccttcccaactactcgttactaacaagcaagcgggaagcaggcataggtcagcagctgcatgcaggtaccaggcaggcgtgttgatttgatccaggagggaagccatgtgcagaacagcagctgtgagtggaattaacagcagcttaatttttgatgacattttatctcagatgcatctgtcttctacacaggccagctaggagactgaatggagatggggtgggttcactgtctgtccttccatcctcgcccccacccctaccctcagtgctgaggactaagcccaggaccttgagcttgctacagaataattttgttcactgaactaaatctctaaattctttatggtgacactaatctgcaactctgcccggagagcagtgtttgtttaggtttcccgattgagtaagctacacttgttctgatcacttctacctgctctgtccaagtgtaataacccttaatttataggccacacaatggttatttgggtctggcaaactctgagtctgtgtattccagaaatggaggaataaccacaggctgggcttggggaccagctggtccctggacctagacctggctatgagtcctggacttccagaagcttctgatccagctgggagaatacagtgcactgcaggctctcctggagttatcaatttggagatcatttggatttcccactatgtccctatgcacaaattttcctggggaaattgtcacacttctccttggggaaagctaaggagatttacagtttatattttggggtatgtagcagtgtccttctttgacgccccttaattgaaggacttagaagtaattcaagtcagagcagttttatttaactactcacactgacagttacacttcacatctttattgtttagaaaacacatagggagctgggcagtggtggtacacgcctttagtcccagcacccaggaggcagaggcaggcagatctctgtaagttccaggcaggcctggtctacaaagtgagttctctgtacagagtacccctatctcaaccccccaaaatgaaatcacatagggatttatactctgcaaccttacacaatgttcaaaataacctgggcaaatgaaatgcatctgaacataatattactactgttcctcttaaaaccataccaaactgggctgcagggggctcagcagtgaagagcgctgctcgcttttccaggggacccaggtttgttcccagcacccacatggttgataacagccatctgtaaccagtccccgggatctgatacccacttctgacctttgtgggcaccaggcaggcacacatgtgatacacagatgtgagtgcaggcaaaacaccccatacacataaaactttaaaaacaaacaaaagaaattcagactgtcaatgtggatcttactattctgcgcatattgcgaatctctggatgtctgttccagtgtttgctttgtaacacatctcatgctgcatgatcaaccgcaccctcccaggacttcatccaacaacattatcttggctgctttcttgctgtgatgaaatggccgaggaaaagcaatctaagggagaaagggctcatttttggcacatagttgcagagggattcagtacgtcgtgacaaggaaagcatggcgacaggcagggaaggcaagggaatgctggcagggtaaggggctggctggtcacatggtgtccacagtcaggaaacagaatggacaggaagccccaggctcacttttggtgacccactttctccagcaaggcttggcctcctcaaggttccacaaccaccccatacaactcagctaggcattcacatacatgaacatgtggagaactttggtccttcaggaagtatgagcacatgctaccgtgtctagtgttagagagacagctagccatagactacccattctttccagctgcggccctggtcctcagcttgcctgtatctacaatggttttgaaagttcttgtagctgctagtaagttcctgtcgttactccctggtctttgattcaatctgtgccaaccaggtccatctgtactattccactggcatcaggcccatcaacatcaacagctgaaaatgtcaacaaatccagcagttctgtctgatgtgcgtgcctttttcttcattcttttctttctgcagcagccatcacactctgtagactttgagtcacctcatggtggcagacactataggagttatgagtagggtactgatgctgccctgcaggttgatgactgagtggtctctaatattttatgtcttattagtgacctgtgtaaagcaaaggcatcagctggcaagagagagcatgggattggagttttaagagatgagggaagcaaacatattccaagtacagagggttgtcaggtgacagtaaggtctcatttgggatttgcagtcaaaaagcaagctgagcagaggcacacagtccacacactgtatggaacagtagtgggaaggctgggcttcaggatgttggggatggccaaacaagtgtggacgagagaacacggagcaaaggctggagaggtgctcctggggagtggcttgatgtcatctgaggccagtgtgcatctcacttgggtgaggagatagagagacaaggccatggtgagtgcatgctggtgagatggggaagacttcgtggatcagatcagagtttggggatggaaggcagttttgaataccccagtgtaagattctgtggtcaagagttaatcacatccacaaaatgttctggatgctcagtttatctgtgacaggtgaagccaaaaactcccagcacagtcaagaacagtttcataatagagaatgtgacaagatttaagtacttcctgaggaaggcatgtgccattttcaaacacacagaaaattttattaatattacttgctttatagctgttggtccagtagtttaaagaaaattgggctttattaaatgaagagacagttgttaacaaataaagaacagctcctctgcatgtggggtgtggccaggcgaccactatgtcagtaaatgtctgtgccctgggtttcctaatctcatggacacataagactttcaaaatataagaacaaaagcctcttggctatggaacagcagcacttcctgtggttgctcaaatattggtaagtagagggaaacttgctgtgaactatcaatgtgcttacctaatagcaaactgataggataccatggcctcaaaataaagaatgaccctgccatcttgtactagcatgtgtttgtgtacgcatgtgcatgtgtgtgtgatattcacacatatctgtttgccctgttttgctgaggaaatgtaaacctccactgcactgggactgtattggatacatctggcttgcttttgagagaacttccatagtaatctggtttgcctgtggggatattattattaccagaaaaaatagtagttaggtagaacttcagtcataattaattaaggaatttaagcatccccaacaacctgtgtaatcactgaggtttccaccaagtgctcaagaccctccttcccaaccctgtgacattctgcacctaccagaccttcctcacactgtatggggaggtgacttgccaggcaccgcatgagatgaaacagttcctggctggtgaagactgcctcatatcacagcagcacagtgtgattcctacctagcacatccttcggtaaacagctgtggggtggcacactctggaatcccagcacttgagaggctgaggcagattgctgtgagtttgaggccagcctggtgtacataaggaggtcaggccagcctggtgtacaacatgaggccctgtctctgaaaggaaaagtacaatgtctgtggtggacttttcgatggaatcgtgtgtatcagtggcagctcctaacactaaagcaaaagatccctccaggtcgtagtggatcagtgcagtacttgagtgatgtaaagacctgcagagataatgacgaaaactattcggaagtaaaagagaatccacggatactaatgcctgaataatgatgtctaacagctgtcaaatgttttgaatgagccctcactgtgttacctgtgtgctcaacagacatttgagttcctgtttctacatactggacattgttcctaggtgtcaggagtacataataaatcaatcaagattcctgtccctacagaggaggtctgataaaaacaagtatgtgtagcagcacacagataagtaggtagtggtaagttatgatggtcagagaagacacttgcagttgggtggcagtttagcataagctctgaaacctgggattgattgatttagtgtgtgcacatgcaattgctaaccctggtttccttgggactttctgtgtaaaacaggttggccttgaattcctgcctctgccttgcaggtgacggtattatttaatgcttgttttcccactgtggtaacctgggaatacctagtttccaggacatgctggactgttgaagttccaaaatccaaaccaggtggccaaacttcagacccctctctcttaaccactgtgtgattgtgtgtggaaatgcacatttaaaacatatttttatagaaagagctagccccttgccctattttttcctcaaaaaaataaaacaaaacaaaacaaaacccactgattatctatccagagtgtgtctccacattttgttgcagtttattgtaagtcaacacttctgttagaggagagcagtggaaagtcagatgcttgccaagctcaagtgtgcctgcttattcattgaaacgttagccgataagagttgaagcagaaaccattgcattaaatggcttttaaatagcccatggatttaattttttcttgttctctgtgctttcatttaatacaaataattgagagtgttttatgtttatttgatgtgtgagtgttaatggtgctgggaaaacttagtcatagatctgactttcgggtattctgttactcattccctacctaagaacctgtggtaggggctgcaggatggcttggggattacaagtgcatactggccagctctgctggtgtacgcttttaagttcagcattggaaaggcagaagtcagcaggtctctgtgagttcaagactaacctgacccacttagttccgagacatccaggaatacacagtgatgagagagagggggcgggaagagaagagagagctgggcggttcacaacaccctgtatccctagctcctggcctcctgacacctctggcctccatgggtacacacctgctcaatttttaaaagaataaaaataaatataaaacaagacaacctatgtcagacagttttgttacagcattttcttggtatgggacaaactagtcagcactagtcatccatggttagtaatttagctatagtgacaatactcaaaaaaggtgccagaccagatatatatatacacatcgtatacacagtacacctgctgagaaggcccctcatggtgtaggtgtacggcctactgaattgcagtccaggagccccgcacagctgttttatgtcaggaagcgatgctagctacaaagagagcagtcccgtgcatacacttggatcattaccaagtcatgtagaaacatactaggtttgttctgttgacctccatagtttcaggccatttcatgtaaccgtgtttatctcttcagcagctttggctctcaaaaatatttctttttcttatcctttgacttttcaagacagggtttctctgtgtagcctgtcctggaattcactctgtagattaggttggctactaactaagagattcgcctgcctctgcctcctaaattctgggattaaaggctgcaccactaccactaagcaagtatttcttaaatgaatgtgattttgaagtttataagctttatgttattcttgaaataatactctatgtgtttttcttccttcaggacatttattcaaaagagtaaaccctccagtgaagctcctgcttcatccttgttacattcattttcttccttaaactttgccttcctccttcccatctgttctctgagaacaatgccaccttactcgtaattgcagacagcacaaagccacctattttatgggaaagggtttaaaatccagcgcagcattctccatttttgtttcggtgaggcattgtttgccaaagctgtttcattattggatgtgaaaactgagtagaacttaggagggaagtaattccattttaattatacctgtgatgttcatccattcctttctcacaacataaatttaagctatagcacgggtgattcagggttctcagccttcactgtcactggagtcctttggtgcctttcgtcagttaacagcctgctttagagggaattccagtcccgcggcctcctgagggccccgcatccctgtgctcattttcacagaactcctttagctcctcggcagcgagattcacagcttgctttgttcataactttagagaagcagacaaaatgctgaaatgcagctgtgtgattgtaccccaatgattattaaagattttaattgcgtttagtgtgtatgtgtacgtgtgtacatgtgtacacacacaccatggcgcatatgtggaggtcagaggacaacctatgggagttgattctctctttctaccatgtgttcctgggaattgaattcaggttatgagaattggtggtaagccctatccattgagccagctcactggccctgccaactgactttggaggcttggtatattgaggtgtggtacattcctaatgttgggtctgtccccgagggtcaattaggacaacatgctgtaacttgcaatggggaggaggcaaagttctccagcccagtgttgtcactgtagagtcagccagaagaaactgcccatgtcatggtggccatgtgtgagatggtatttggccttgtattctgttagccttttgtcaatgtgacaaaatacctaagaaagtcaacttgaaaggaaaaggttatatttgggctcatgttcagtctctgcagccccttggtttcatgaagaaaatggaaggggccagggtcttcctttacctcttcttttcttctttctttcctcctttcttcctttcttcctttcttcctttcttcctttctttttctttctgagacagggtttctctgtgtagccctggctgtcctgaaactcactatgtagaccaggctcgtcctgaactcaaagatccgcccgcctctgtcactgtaaccaggccttcagtatacctttcaaaggcttgcctcagtacccttctcctacagctaagctctgcctcctagtttctcttacctcacagtggtgccatctgctggggacagaccccacaacacccgggactttagaggacttttcagaccaccacatgctgaagaactctggtcatgtcttttgtctcttcctcttaccttgttgttttggttattggcaagacctctggcctgccctgtgaaacttatcacgtgggtgagggctgataaggtgggctctctgtagatgctctgaaggagtcctgagactacctttcacaggcacagagattgcaaatgctgaagcaggagcaaggtctgaggaggaggtactctgttagtgaaggtctttgtggtaagacatctgaatgtgtctgctgaaactgccatccactagcctgctggtggtttgttttatctgctaggtttttgctatctcctgtttgaattggataatgttatcgatttctcaagtttatgaggattaaataaaattatgtttacacgggcacccaacacagatgacattgtcagtttttgtaagtgatcattcttactgttattcttggactagtagcagcattcctgctctgagggcttatgcctagttgcaggcatcctctacttgcagaggagttcagagagattgggggagaagcagccagatgagcacatacatttactcttgctctcccgtggcccagcaatggcagacactgagtcacactgcctctctgcacctctaattacagatgttctccgtctacagactggaagacagttgtgcttgaagtcgctgttactggtcaagccggtgaaagaaaccattgccgggggaggggtattttttaaaggaagtaatgtgagagatgccagacccagtaaatatgaatgggtctgtagttccctagcaaatcatgaaactgaagacgacaaatgtcagcccatagaagtcttccattagcatatggtgaattaattcaggcaaaatttgctaatttgccaagaaatcagtacttagtagatagagaccagctgcttgtaatgtttgaagtatttttggtgacaggtgatagattcaaatagataagaagtttcaatgtcctgaagggtcccaataacaactctcccactggagttgttgaagagatgctctggacacagacagttggccatctggatctgtgggtcctgtatccttggactatacaagagtgttctaaaaatactctataaatcagtgattgtatttgtcctgaatgcctgtagactttcccttcttcctgtttcctaaacagtgtaggtcaggaactctttacacagtatttacattgctaggagttttaagcaacctagaagtgactggaaggatgtaggcaaattggggtaagttatgtgccagcaggataccattctatgtaaggaacttggcaatctggagttttttgtgtccttgatgatgagtggggtggtcctggaatctttctccgtagaaaccaaagggtgatggtataaacagatttagagcttcctgattcaaatggtagcatatgattttgcatattgattttttttctgagtgtatcagagatcatgcctcatcaatacatatgtgtaggtctttttttttttttttaattgcttagtgctgcacttcatgggtctatttaaccaagcttcctcctggtgacaaggttatttcccatctttcataattttgtttatttttaagatttatttatttatttgtttttttgttttttttttttttaagtacggtttttctgtttaggtctggctgtcctagaacttactctgtagactaggctagctttgaactcagagatctgcctgcctctgcctctgcctctgcctctgcctctgcctctgcctctgccctgcccctgcctctgcctctgcccctgcccctgcccctgcccctgccctgcccctgcccctgcccctgcctctgcctctgcctctgcccctgcccccctagtgctgggattaaaggtatttgccaccactgccttatttattttatgtgtataagtgctttgcctgtgggtatggatgtgtgccacgtgcccatggaaatcaaaggaagacctggagttacaggtggttgtgagccaccatgcgggtactctacaagagcaactgagctcttaaccactgggctgtctgtctcctctgcctcacctcctggggttttaactactgtgttgcagtgactgagtctgattgtatataagtctcttcacatttctaggtattggagttttattataaattcttagacgaggctcatagagcaaacgctgaggaagtccctgaagggacacagagggaaggaaaatcgtagctgactcagctgtcaactgtgtggtacctgagcattgcagacctctgctgtccttagatgtctggttatgcttctggaagttgggactgctgctttacttttgaacagttctggtcacactattgttctgatatcagaagtattaaaaggcacttgctccatttttacatatgacaggaagtcaccaatggttctgatattggggctatggccagttattagttggtgcttcctttgatgtgtaggtaattgccatcattttaaagatgagtaagccagggtgtggagaagtaacatttcacccacatgtccctggggctgcttggtttatagttcattttcatttcatggtttctcttgtttaactctgataaaagaggtttgttgttgttgtttgtttgttttttaatgcagaacttttaactgaagaaaaccatgatgtatcttttcttattttaataaaatattttgctaattcttgctgggtggtggtggtggtgcacgcctttaatcccagcacttgggaggcagaggcaggcaggatccctgtgagttccagtccagcctgatgtacagagcaagttccaggacagccagggctgctacacagagaaatcctgtctccgaaaaccaaagctaaacaaacaaacaaaacaaaaacagaaacatacttggctagctctttggaaatttcaaatatacagtgtattttgataatatttgataatatttgctaatatttgactgtagtctgccccactgactcctcccgtatctactcccacccctcacttccctcctaatttcatcctttttttttatatttattttttaaaacacaccaagtcccatttgtgctcaggagtatgggttcatccactggagttaggctgaccaatcaggggccacacccttagagaaaattcctcccccagcatcctcaactgataacagattctcagttgggaggggcgttgagccccttcctctcccctcccctgtcccgcgcgctatatgttctcgccggcaagaaatacacgcaggacactcggatccttctgcaggaaagctttaatgcatcttgagaggggagagcataagcttaccagagcggagaccctgaaccaagaatcccatcccttaataaaggctggccgcggctgcctgggacgtgttaccctatgaatggcttcagctcctcaggccaaatgagccacgggataggcagagatcaaaggaatggaaattacccagcgcctgcgaaataatttacattcggtgcctgtaggcaccatcattgtaatggagaatgcaggaacagctccctacactcccctcccctccccatgctggaatgtacgctgtcttgatttggtgcaggctgccacagctgctcaggtcacagtgccgacatcctgccctgttgggaaggctctctttcactctgtcctcctttccttctgtcctcgcttcactggggactagggagtatgatacaggtgtcccgtctgtggcttgggcgctgcacgtatactctgtgcacttggagccgctgtgagtttcagggttcactgctgatgagaaaggcttgcatctctggatttcatctcccccaccccacccccatgctgtccaatgtggtggttgaaagcaggaagtctgaaactctaatcgtgtttgctaatttgtagccagcagagtgacaatgggagcccctttagcttctgctatgagatctggtctagccctcagtcttgggatcaaacatttctctaaagaaagttccactatgtgtttttaggcatttttcatgagtgagtctagaaattacattttttaaaaaaaattaactttttaacttgcttagtaatttctcatttgttggctacagtttgatattttgagaaaatgttacaaattttatttcatcttctcaagtgaataaaagcttaaaatagtgtctttctttatcctttgagaatttcatacaatatattttgatcatatttattctccttcccaacttcccccaggtctcccctcacctctccacccacacagtatcttctttatctttcaaaaggtaaacggctatgggtgcatgctggctaaccaaccctgagctggagcctgccctggagtggggctcatttacccaccgttaatgattccattgaaagacactgttttcccctttcagcagctgtcagttgccgacagctccttggctaggggtgaaactgcgctcatcttccttctcagtgctgggagatgtctgtcctgagcttgtgcaggtcttgtgcatgctgtcccagtttctgtgagtttgtgcatgcgtctaccctgtgacatctgggaaaactctgtttccttgaagtcacccctctcttctgacgcgctgatctatgggtatggcacagtgttattaaagccatttttagcagaataacagtagtaggtttttccttctaggccatgacctatctagaggcaatttcttggccactttagcagtgtcagctatgggtctatcttttggaactggccttaaacccaactttaaaaagaatctgttagttgctcccataacatttgtaccactggttccccagggccttatctggcagccaggtcactattgcagtgtgcagagttcatagctgggtaaaactgatggtgacttttctcttccagaggcgtgtatagcaccttccagcaccatgaatactgcccagtgtatgtgaagctcccatatgagtaccaactagatttttccatgttctgggacataagagtgtagtgtcatcagcaatagggtcttaccatcaagttgtagaggacgactagtaacattggcaatagcttataatgtttgggggtgtctacagcatctcattggccagcaacacaaaaaaaataatccattcctgatataggggcagtaatttgggagcctctgatgtctacttagggtattttgatacatgtatgtaattatcatatcctggtaattggtatatccaatatcttaaacatttgtcatttcttcatgtttagctcattcaaaaacatattccattagctattctgaaatatataattaattgtaaattatcctactgtattataggttattagaaataggcagtggaggcatacacctgctaggcatacatcctagcactcgggaggcagaggcaggtggatttctgtgagtttgaggccagtctggtctacagagtgagttccaggaaagccaggactgttacacagagaaaccctgtcttgaaaaacaaaagcaaaaaaaagaaataggaaattttgttaaaacatgactttatgctgctatgtgtctatgttaatatgcatatataatgtttataatatataaatatgtgtacatataatacataaaatatggtctcaagataatactatttataaggcttactgagggtttacttttgtctaaaaatatgtttcagtaaggatgctaattctaagtatgggcctaaagtctctgaaaatatttttttctttttcttttttaccaatttggcatctagtagatttgtttcattttactttaaatatttaaagattagtttattttagttctcccatctgtcctttccttcactctagcagccagtgtccatccacgggagcagctgtcatcaccacacagttcacccgtcaaaggggaagtttctgtgtagatgttatgtgggcagattctcttgatttacctccccataaaatgacagctcggtggaagtgtcagggtcaagtcactgctgttctttgatagattgtgaggagtggtgagtggtgaggagctagacactggaggccagaagaacgcctccggtgaccggtgaaagtgtatcttcacctcgtccttgagtcctgaggctctagcctttatttttttctagaatatttgtattcctctgcatgaggagtcagggaaatctgaggtgatcttaccatgtgttctcacttgagcccagtagtctgcttgtcttttttcctgttggatctgtgtgtctgtcctctgaactcttcaccccctgcttctgtttactgtggagtgttaggagtagggtgtagcttcatctgttaggatgctgtagcttgttcccctgactgttagccttggttggtcttgaagaaattcactcccagcactctatttccaatttaatttgtaaagacatctatccagttccgtctagcagtacacactgagtatacattcaaatcatgtaaccagttactggactgagtttgggccagttattcaacctgacacatgcatggggcatactgaaccttagtgaacactggctcctctctctgttgcccattctctcacatttttataatcacttttaattatgctgattaatgtatattcagttagaacaacattgtatgtattggggatatacaacagacaaagaaagcgtttgtgcactccagcgtttccatgtctcctggctcccatccctagaggacattattcgccttttgtctccgtggaactgtctggagggacctgtcttcctgaggtgtatgcagtggtgtctgctcatgcacttgcatacctttgcaaggacgtgccacccagtccctgttgatagacctctgtgctgtgaggcaggctttcttgtggtcctaactctttggatttccagcccctaaatatcgacacagagactattaattaattatgaaagcttggccttagtttaggcttgtcccactagctcttataacctaagttaacctgattctgccgatctacattttactatgtggcctttttcctttctttcgttctgtatgcccagctccctctgtgtctcattggcttctctctgtcgtattcacgagcctaggttcctcctcccctcccccctcctcgtgtctgtctgtctgtccttagcctagtgaatttatcttagggtaaggagtgatacactacaccaagcgatctaagtttatgtttcctagttgttataatattatttctccattgataggaaatataaattttgacattttggtgtcctgaattttcctgtgtgcttgagtctgttactcagacagacttctgagattctcaccttcgaaactctgtggagttacctctcttcttacattgtcattcatgggcacattttaattgtggtggtttttgactttagggaaagtcactggggctgcaaagatggctcattgtttaagaatatttactgctttgcagagaacctgatcttgattcccagcacctatgtcaggcacctcacagctacttgtaactccagttccagggcatctgatgcctgttctggcctctgtaagcatttatatacacgtatgcatgcacgcgcgcacgcacacacacaaatattttaaaaagcgaagttctagctgggcaatggtggcacccgcctttaatcccagaatttaagaggcagaggcaggtggatctctgtgagttcgaggccagcctaatctatgtagtgagttccaggacaaccaggtttgttatacagagaaaccatgtctggaaacaaacaggaaaaaccccaaaacaaaaaaacaacaataaaaagtgaagttctgctctctagactgaatccaggaagaggttcctgtgtatgtggtctgtgtccaactgagttgtttacatttgacattacggtgaagaaaatgagcagctgcagagatccaggaaataggtcatctctccactgagctatctgaacatgaatgaaaacttaatgtaagaaagggagtctggaatgcaggattatagtagtaatataactggtgacaactgggcacataagcacagttctaataaaatgactgaattctatgcagttctttcaaacatttgtaaagtgaaatggacatgttttaaaaatcttcagaagtccaaaacaatgcttggtgactttagtagaatattgtatacatacatacatacatacatacatacatacatacatacatacgtgtagaatccctatttgtcatacctccattgtcaccaagtccattcacggatcacccctgcctcagtcacttggtcttttagctgctttctcagctagtcttgctaaaagcattcttggatcttactggctacttcaatatattgatcctaatcttttttctttcttatcttgcttttctctctctctctctctctctctctctctctctctctctctctctctctctgtgtgtgtgtgtgtgtgtgtgtgtgtgtgtgtgtgtgtgtgtgtgtgtgattgtgcacatgtggagatcagagaacaacttctagcagttggttctcaccttccaccatgtggattctggtgatcaaattcgggttgttggcagataaccccttagctggtagactttattttaattggttattctgataacttttcccttgatattttgttggtacctgtgtggcaaactccatgttgaggtcaatatgctttgttaatcacctgcttctggacatctgagcattgctgaaggtatgagcaccacagacccatcatagacacacttaagtctgctggactgccgtctttagtgaacttgtctttcctgtctgaaagggttatttcaggactttcccaccccatgaggtcctctctgtcccctcttcactgctgacctccatcagggaactcgagaaccatcagatcagagtgactccagctttcccctgcccagcgtccacgtcgtctacatctaggcctggtttctgttccttccgtttgtcacaggagaagagatctctctccattgggccctgctgcttctcactttccaccttcctaggacctcaccttccttctcacttctgttgtcttcagcctctttccctaccttatcctctcaatgacattaaatacagtcagttgtctcccttctcaaagaaggcaaaggatgagtcaccaccctcacctaagcacccttttccctggtgaccttgccgttgcctcttcaaagccagctgctcagatttgagatcttctgtagctgcttcaatctctacatatagcagagccctcagagaaagtggaagactggtaagctgggtgtagaagcattttgtttagaagtatctaaggaaataattgtaagaaaaacacaagggaaaagttcctggggtctgggattgaaatttgaaggtggacaattctattctgttgttgttaagtctatgagtaagagttaatttatagttttgaccatgtgtatacagttgccacaaagatgagattaaggtctggggcaatgccttgttaaacataacagtaggaagaccagagttgttccttgagccctgggttgaaggaagaacagatgttctgacaggatggcaagctcttcttggggttgtgtctacactgaatatgaggtaacctaagagttgacttagtgattttctgaaaatataattaaagatatttcctctagcttacaactttttttttaactcaagtagtatttccataaaatattttactgatttacgtgtattttctggtttaaatgttgtatagatacaaaaagcaatttccccatgcgtatcctttcttactaagagtatttcaccttgccagtgctcctgctgtgttgagggggatagttgatgggacatgcttaggagttttcactcactgttactcctggctttcaaacagacataataaattgtaatgtttttcttatatagagttaactttaccttctaaacatttgcccagttataatgacaattcattaatatgctatttgaggttttcaaaacaaatcacttccggatccttagcacggatctaggaaaagactgcctttaccagggaggtatggagaactgtgcgcctctgcctcgaggacaggcaggacaccacttgtgtagtttcttggagctgccaaaaggttttagtggcagtttaagagccagctttttaaaattgctaaactttttaggtcctgtgcttctagaaatgggcatatgagtgtcatcaaagctgtgatgtagaaaataaatcatttcctctttgttatattgtgttgaagatttctagttgtgttggttgttttgtaggttgtgttgttttgttctgtggtgctgaggattgactctccagccttactcatgctgggcaagtgctatagcactgagctacatgctgaacaaggtttcactgattttaaagtgttacaataactcttccccacagccaggtcccagtgttgcatcggccccaaataacacacagagactctattagttataatgctgttggcctgtgactaggatttcttataggctagctctgtcttaaatattaacccataactactatgtatttctacaagttcttatcttaccgagaacaccagactcatgcatcctctcctctggggatcacatggcagccttttttactatacttcccagaatcctccttgtctcctattcctgcctgtcttgcttccctattggtcaacagtgttttattcatcaaccaataagagaaacatatgtatagaagactttccaccatcactaaagaactaaataaaataatttattaatttccaaaaggacttgtgtgattcccaatgtgtatcaaggaagcacaccaaatgagggcatttatggtgggcagattgattgcctgatcctcatgtccatgtcctgagtaccaaccacaaggaagattccccagccatgctctgaacagggtgatacaccgtgtcttgggtaacccagctacactctgaacagggtgatgcactgtgtcctgggtaccacaaggaagaccccccccccagccacgttctgaacagtgtccatgataacaagccaaaatggcatgctgaaaagaatgagcttggtgtctgctggggtcgagcccttgacactgcatcacagatgcatgcattctgataaagctgtgtccttcattcttctctgtgtggtcagcactgcagtgtcctcttgctctcaagtagtcttctcttcagttgtcaagagatacagccatggttgttgtgggtttgcctttgttgaacttctgctctgtcgggtattagacacatgtttcggatctttatgccttcctggtgaaataactctgagctttgctttacactacattcaagtctgatgtgctcatagcgtttccagatgtcttatggtcacagactattgcctgtcttttccatcagtttactttcagcacatctttgtcctgatactaaaagtgcattcttgaagacagtgtccaggtttttatattaaaaatttatttgacagctttttttaaattttcattttacattagttatgattatgattggtttggttgtaagttgagatactgttcttttgatttgctttgcattccttttttggtgttattatttatattatcttcctttctcgtctacttcaaagctaataaaaactttttcctagtgtcccattttaatttctttcttggcttcttactgctgagctgtgttttcaggtgcacttctgtggagttgcagaatgcatgcacagtttattgcaccctacacagactctaacactcagtcagctccccaatctctgcgtgcactgtcactcatactcaattttatgccttgtgtttaacttatagcatatataaaaatgtgctataatattttaatttaaatggccatatagcttttaaagaaattgagaggtgggaaaagatgcacttgcccttattttcacacatatttactgtttctggagctctttatcccacttgctctctgtgatcactgctttaccagtccttacagtgttgtgtctgcacaaacaaattctttcagctcttattcctctgaaatgtctcttcttgcctgcaaagaactttgtcactgcataaggactttggagtgcatttgtttttttcaatcttctttctcaaaagccaggtttgtatttgtaagaaaacacaatactcatttgatattagactaggttttaataaattgattcagcttcaggtaactttagtatcattgtagcacagtagagaggcagagccttttgtccactttgggtaatttggagggtgtgttctttattactgtaatgtctcctggcagtcccatttcttcagctacagccaggatttcacaaaggagacagtcacggtctccttgaagagtaggtaggctccttgccctctgagatgagtttggtcttccctcgtggttagagcaccttcagcttgacatggcttgggaaggaacaaaacatgtaggtcaggccatgtgtgaatacatacgagcagagactgtgagaaggggggaattttactctcacagcttcagtgttccaagaggaaaagtttagcatgcttctttcatcaagggagtctttacaaacggctgtctctcccatctctcccctctaactctaggccttcacttcaccccagtcttttctcaaatgccatcccttctgtaacagcccttgccttacactccctaaagtgcttccttgcttttcagacccggaactgctttggtgctttgttggctcacatatttattgtccctttctctttctatttccctctgctggcagaggaattgtttgaggacagacatcttttctgtttagctttctcttatcctctcatacaggccagcactgtgtatataataggtcaaaatcaagttttgctgtctgagtaaatgatcagtgaatagtgaggtggccgaggtgggggtttgagctgaagctggaagctctgggatggcttggagcgactattaactcaagtctttgctccattctgagagccacatggaagagctcttcccactccactgctcccttctctgcgtgtgggaagatgggtgcttgctcctttagtatcgggcttgacacagttgagtaatgaaaataatgaaaagaaatcatagccaagctagtgaagtgaggtgccatgtggaagaaaatattccttacctagaacaaaaacaagcatgtcacacccttgtgggaggatgtgaatttagcaattgaaattggggtgtaattttgagatgtatttatgtatggtgtaactacactgagcaaaattgtgaaagcctaactctccattgactttcaagatttctgatttttccctgatatttaggaactgcacttagttgtccagaacttatcaggctaccttctgacttagatgctaagtcagaaatagtttaagcagtgaacatgttctttccgaagtgaaacatcccttttttctagtgttgacagggcaactaaccccaccttaaaattttttagatgtgtttactttatttgtatgttttgcctgcatgcatgtatgtgcctcacatatatgattgtatctgtggaagccagaagagggcattggatctcctggaactggagttatgattggttgtgagccaccatgtcagtgctgggaatcaaacccaggtcttctgcaagaaaagtaacagctctgagctgctgagccacccccagaccctcagctgatattcacacacaacttggatgaacccaaaagagtccagaattacatgtccacagccactccaaaccacatcttccttctctgtggcatgtgggtcatggtgtgcttgcttctcatcaagttgttacaatgcccgtcaagcattcggcacaccttgagccataacatgccgttctattataattgtggaacgggatggtggctcgtctttaattattttatcatttgtttgctggttggcttgttcatgtcttcattcacttgttctttttttttctctctctctttttattattattaattcaagttagggaacaggcttgtttcacatgtaattctttaccgacttgccagagtcttgtgccttccttgcctttaactggcttagtgtggtcagttgtgcaggaattcatgtctgtgactagaaaccatctggatgctgtagtaggaattttggttttgcctttggacaactgaattttcaagatgtgagccttggacaaagaagcccagtttttgcctctgtgttttcatctgtgccttcctttcatgaactcaccaagcacacctgactggatggaggttttgttcccatttcactgcctgaaagttcttgcactgtttctgttccttatcatattccagatggagcagacagccacctattctgggcatcctacctaaggaagcccttgctgcaccctccctcccttgtttcattttcagacagtagtactatttataattactttgttttccctattttctcattcttacctgtttcacttcatctttgggggaattttttttcagctacttacagacttaaaatatcctttctacttgagctagccagaatggtttcagttgctcacagaaaagaaaggtgagttttaggagctggttgcaggcaccagataatccggcattagggttggtcacttcgggtataaggtagactgtttttgtccctttgtttgtatcatttccactagtgaacacagtgctcatcatgcactgtcctaaggaccttcatatgaatccacagaatgtcctcagatagtcctgacgtaaagagcctcgttagtattagctccactccccagttaagaacacagacgcccaacaattaagtgtttccatggataagcagctctcttcctctctctctctctctctctctctctctctctctctctctctctctctctctctcagacacagtaagttgtgtgaggaggtggggcaggaattgattaggggtatatttggaacaggcagctggtttggcagttgtttttatatgcctggccaatataaggaagagtggagagtgactggcccaagctcctggttagtttagaacccaccctcttaacctgtgggtcatgacattcagggttacatacaaaatgtgaagttcccaggattgaccacagggaaacgtttctgagtgtgcatgctctattcagggagtggtctgcggtaactgcacttttggtttcaaataagtgagtttattaacaagagtaaaagagcagataataaaacatctagttgggcgcttagcagatctggcaaaaatggctggagtagtccaactgcaaggacaagggagagggagagagccggaagcaagcagcagacccaacatcatcagattaggtgttcacagcttccaacagacagggctgaggaagcccggttgaggcagcaagctggggtttttgcctgagaggcccaggcagagcagagttgttgccctctggtgagggtgaggcttccatgtagaacaacaaataaccagcagcaggtagacggcaaagcatcttaagtcaaacatgtacaagctcctgcagaaatgactgggaaaccccactgaacagtcatgctggagtttccgactggatgtctatggatgaactgtggcttcgtgttgtcaccacaggtattttataccatgggatgatcggtactgacctccgaagggcgtggttcaccttcgagctgttctcaagggcagacacagtgtggttttgttttcaagagtttattcttacatattgtgtatatgtgtgtgtgtctctgtgtgtctgtgtgtctgtgtctgtgtgtgtctatgtgggggtttgggcatgcaagtacagtacttgtggaagacaaaagtagctggagctagagttagaggcagttatgagcccctgggtgagggtcttgggaaccaaacctgggcccttttcaaaagcagtaaatgctctccagcctgtgcatagcacttctaattccttagctgtttacaattctcctccctccctataacagggccagggagccaactgcccaggacaatgagtctcagaggactcttgagagaacaggcttgaatcccagacattggagcccaccttggtcctagaatccactgccatcaagtacaaacacacgtgatggtttaccaatagtttatattgtagtgtaatgcccaagtattagtttacagtcaaacatgtaatgaatccaaggtgtctttggcagcattcatacatatatttcacaatgtgtgacttcactgaagctctggttttgaacacacaacacccacatgttgtactgtgcacatcgtcacttcacacagtgccaaaaagtgctgcctgaaacactgacttagagttgagacttttgtatgttaaggatgagtgttttactgtgtacatgaacttttcttaccttacagaaaatggtttaattatgggaaataaagacttgaacgtttttcctaacaccatttctcagcacatatgcacacaggtgcatctttgtaatgtcctgggttacagtgagcattagctactctcctcactgctctgacagatgtctgacaggaagccacacgggagagaagggtgtgttctggctcacagttcaagggaatacaacctatcatggcaggaaagcatgttagcaaaagcatgaggcagtggtcatcactgcatccacaaccactcagggagcagagcaatgcatgccagtgcccagctctcttccttctttttatttagttcaggtggattttcccacccttatgaatctcattcaggtaattcctcaaaggtatgccaagaggcttgtctcccacatcctgtcaaatgaattcccacaccacataaagcactgctgtggcctcagcattcgggaagtggaggcaggaggtcatttttacccctcatgatgtgatgccagactagtgtacatgagaaaagggaagcggtagtaagaaataaaaggagccaggcatgcctgtagccagcttctagcaggcatggcttacactgtcccctacaaagtggggagggggagatagagagacagagacagagagagagaggcggggaggggcaaggtcaagccgtagaaaagagcatgcagccctggatcagaggaacaaccgtatttgtgagaatttttgtcgtggtagtaaggatgctgcccttctagcgaggtggtaaccatggacgatgtcactcaacctaaaatggtatagtgctctgtgtgctaaccagcaatccgtctacctattgattttgaaaatcaaaatacagacttaaagatgtgtagagaattttactttaagtgttgtacccactggtaagggcccttaagttgggaagcaatgataaagtgtgttcacattttaaaatagtgtactttcattaaagatgaactgttagtgagcattatttgtagtcttttaatagtccttttataataatcaaagtgatcatgacctcttgtgcttttccctagcatacatgtgtggatggatatactgaggcacacatccagcctaccaaatcaagtagcagacagaacattccccggtgtagaaactccattacgtcagcaccagatgaacagcctcacatcggaaattaccgcttacagaaaacaatagggaagggaaactttgccaaagtgaaattggcaagacatgttctaacaggcagagaggtaagtttccatgccttttgatatttgcctgtaccttgctccagagtcttggttgatgttggggaatgaatggcacctgtgcctggtgcatactggaatttatgcacacagaacatttgcagccaggtcggtttcatggcagatctcctcaccatttaacaccaaggaaagacttgcctctactttatagcatctcatagaccaggcgtgctgcagattagctgaagcttatctcttatgtgaacacgcctggttactgttgctactctgcatttctatgagtcactacctagattaagttagatgtaaatgtgtagaaaaccactcactaagttttatctggttggagataacatcaagctactactatacagataatttttcagacgacaagagaatttacttctgaaataccatttgtttgtttagtgagggttgtcaagacagggtctcttgtagtccagactggctttgaacttgctgcccagctgaggctgaccttgaaatgtgggtcttcctgcttcactttctaaatgctgggattgttggcttgcatggatgaatcccactaatcttatttatttgaaattattgttgcacagtaaaaatgtgtgtaccataatctatagtgtgtgtgtacagcagggctaaagactatttcaacaaatatctaaactttgtgtaaggattggatttttttttatttcaaccacagaatgttagtaaggtttcattctgctgtgtacataatgatgttataatcccattgagtatctgccttcttgtccattccaccctagaagctgctcagatgcaggctgcactaggcagagcctttgaggatttagaaatcccttttgttagtttggcattagaaagtctgtgtatccagtttctctatgtgcacaatagtttcatttcccaaaaacacaagtttaaaagccactctccccataatgttacctatcaagattttgagaaaaaggttaagatagagaatgatgtttacagttttaaaaagggaaatgtggaagaaataaaatattaaaggcttaatccattgatacagaatcatgaggttaatggcaagtcaatagactatgttctcagactggtagatcatcaataataccatgccttcagattatgtgagcattcacaaagaagtaaatggttcatagttaagagtgaaacacaatgttttctttgcagggttttattcattaaatgacatctcccaaatgtagtctaatggctctcttttttaggtggctgtgaaaataatagacaagactcaactaaaccctaccagtctacagaaggtatttaactaatttaataagtaatgtcagtttttgttaatatgtaattctgtaaagtcaagcatgacattttttgttaggtacaatgttacgttttaccagtatctgatgaaaagacaggatctaagatataatgattataactgattataaagaggtttcaaatgtgtctaatgagagctgagcatcgtgtactcagaatacttggagggaagtgtttgggactatatccgttcttagatttaagaatatttgcatagactctagcaagatgtatgtatcatatgaattgccctttagttcataggattagattttatatcaaatactgtgggatattttattcatatgggtatgcacgtgggtgtgtgggctacacatacctgtgggtgagtgttgagcccctctgggatgtcacatccctctgtgctggagttagaactgtttgcagggtgtcgtgtgtcaggtgtgtcgggtctagactctgacctccatggtcacactgataacaagtgctgttagcctctgagccatcactctagccctaagttttgaagaatgcagaattgttagtgaaagcctggttctgagtaatgttcccataggcgtgtcttctttcgttgcttcattgctcttctttcatgcagactcatcacagacgttaagtcacagtagacagtggccccatcagagggcagaaagaaagcaggaggatggggatcatttagtagccaaagctgtttatttcattaattccccattgggaaaccttctcacatataaacttttagtattttaaaaaacgaagggactcttttagtgtgtgagctatataatacccattgtgatttcagtggcctataatagtatcggatttataaatgtaaaagtcatgtaagttgactttggactcctgagagagagtcttacaagaaattctcggtttgctatgtctccctactgaaaggttcaggcattatgctggcctgcccctgttacctggtggaatccactcaggcaataccctggtcagcccaaggttccatgggaaagaagtctgcacgcaggtgcagaggacccctttaaaagataggcccctgccctctctctctctctctccccctgttcctgctctctgtcccctctctctgtttccccgctctgtctctctatggcgaccggccatggcggtcagccattaccctgttcctcttcttagtctacccattctgccttataataaacttatagtcaatatgtctgtctcaatatttctcttttcttctttttaaacaaaagaataacacctacgcttccatgattgtagtggaccggaccttcttcctctggtctccgggtcaaggagctctgcgtttttatgcatttctccacggatatttggctctgtactttcatgggttccttttaagttcgacaaccagtaaattcctcagcactgacacgtctgctttgtgaggacttgtgtttgctggcctctcttcctgagaacgtgttagtacaggctgtgatacagtcctggggaccgtctcttcttgtatcaccagcatccaccctacctggatgcagctgtgggagtggcagaaggttccctctctgggctgatgaactacctaaagatgctcatgccattctgggcatgggagttggactcatgcatgtgccagggactctaaaacacagttaccacactgcactctggccttgcacacctcccacccagactttgtactcgtcatggattacaccaggggtcactctggcaagtggagtgacttcaagagacatttgaaacttcttccgagatatcctgtaatgtgacaccccatttggtctttcccagcagagccaagtgaaggccatataacattaattatcctagttggaacatgtgaccatgaagctgatcactgccttatttttcttagtagcgggggatctgcttgctgatggaagcgtctgtgaagagcttggaaatctttgtaaagtgttgcttttccatgagcgtcgtctcccagtcagtcctatctcagatgctctccctgcattgtgagttaagtcctgcaggccacaacagtcaggatggctccatggggtgggcgtgtctgcagcacgagggtgaagacaggacgcccgttctttgtggtctcatttttttttggaagtgcttgactaaatcctaccatgatttggtctgaacgtaaactaatttctcctctttaattctcttacatgtttgtaggaaatattgccttccttttccaacatccatgatagataaaagaatctaaatatgaggtcatggctgtttaaaagctctcagatatgaagttctttttaaaatatcaagtccttaaaaacagtttggcctttgtaaatgtgtcttcaatgttatttacatgctgtgcctatctcatttgttttaaatcagtggtgatctccacaataggtagagagaccctggggaattttgttgttgttttgttttttcaagacagggtttctctgtgtagacctgactgtctggaactcgttctgtagaccaggctgaccttgaactcagaggtctaccttccaagtgctggtattaaaggtgtacaccaccaccacccggcataaataaataaataactccagtcatgccatgtctgaatgtctgagtgtgataaactcagcaagctggagtttgcctggcgctccgtaagattggatttggccctacatatctccagggttgtctggaacatcacctgatgctttttctgtcccttgttggtctatgactgtgaatttttatttggtagaaataagaaggaaaatacagtgaagaagaaagacagtaattagaagtgaaactgtcttacagttcaaactaatgtcaatgagccagtactcacactcactaattaattcttgattcagcaaatatttactcaaagatttttttctgtgtatgttttcttctgatctttgcagtttcttccttcctgtttccttttaatgaggtcattgtcctggctgttccatgggaagctctgggaggcttatatataggagtctcccactatgttctcttcttaagctgatcaaaggtaaccaggtataaatctttacctattggtgaactctgagtttatctcttcacctcagactattcttatatctccttgtaatcttctctccaagacacccaactgcagagtatcccgctcacctcatcatcctatgatctcttgtgagcagcagcttgcccccaaatcatgtacgctacaaccctcagaagcaccctggctcctcctttgtcttcatgcccgcctgagagtggctgcccttcttccatgtgacctggataccgtctgttctgtcctgcaagtctttctgtgcacatgtatttaatatgctggcctatgcttacacttttaggagttccatttttggtagcctaaagattagactcattaacatgttactgacagccctacctcccatctgcctcaaggaccatcaacttgcccagctcttccctcccctcatgccccattcctgcagggtcagctttcaccccaccctctgcatgctctctgtcctgctgcctggcctttgcagctgcccacccctgccttcggctgacactgactctcgcctcccttacttcttagactttctcactccctcagagcgctctttcctgttctccatggccattttgaatcacctttctgtactaggatcaggcatttctaactaaggagttatttggtttggggcagtcgtttgtgtgtttgtatgccagcattctgtaagccctaaaacgtctgattgctgggccttatggaatatgtatccacctctactgtggaagaattctgtctcgggggaaatggaagaggctagtttatacatcacctataaacttcagcttggctgtttcgaaggtgacagcccatgtagttactctgagagtcttttctccctcccacatgtgactagataggtctgcttcttccttcccaccccagaggcctgctcgactcttgagaaactcaccttccccttgcctcctgctataggtcccttttttccatcccatgggcctgcccagcatcttgggcctttccttccccgtgtccccaagtagactctgctggatagggtctgcgtatttctccaggacctccccctgcccataatgtagtctctgcttcttcccaccctgtaagttgtccatctcctttgcaatcctgcttctctgagctggataggccattgctctgcctgcaactacaacaacactgtatagcctgtgctatacagtgaacaaaaggctagcctgtgctatacagtgagctatgggctactgtggacgacatgagacccttctctaaacaaccaacgcaaagcagaaaacaagcaagcaaaaagaagttaacttgaatttttatagtgctactagtagtaattttataaagtatctgactaaattgatgtcccagaaagttgtctgaaggccaagaaaggagattcatagtgatcccataaacgacaaagctgagcatttgatcagcagggttctgttaacgtaggcacagcatgtgtgtgatttctcagtgagtgaggcttccagtgagtctaggaactgagtgtctcctgcatggtgaagcagacccacacctcagttcactaattggccaaaagtgctgccaacattgcagacatgatggcagagaaagtttcctgtcctcttaaaactcctgtcagaataaagtacttgaaaagctaagcaggctgtgctgaaagacaccagatgtacacggcccctccttcctcaggccctgtttactgtgactaaagtcagcctggaaaaacaagttacctgtgtctgcagagtcaccctgtgtttaagacaagcaagccacagagtggcgctgacatgaggaggccacagagaggctctgacatgagaaggccacagagaggctctgacatgaggaggccacagagaggctctgacatgagaaggccacagagaggctctgacatgaggaggccacagagaagctctgacatgaggaggccacagagaggctctgacatgagaaggccacagagaggctctgacatggggaagccacagagaagctctgacatgaggaggccacagaggagctctgacatgaggaggccacagagaggctctgacatgaggaggccacagaggagctctgacatgaggaggccacagaaaagctctgacatgaggaggccacagagaggctctgacatgaggaggccacagagaggctctgacatgagaaggccacagagaggctctgacatgaggaggccacagaggctctgacatgaggaggccacagagaggctctgacatgagaaggccacagagaggctctgacatgaggaggccacaggcagcatgtcagcgggtctgatagaaagcagacacacaggctgaccctggactagaggcttttcatagaattaggatgacagacgactaggccatgtccaggccactaggttaaacacaacacattttcccaccagacaaaacaacaatagttagaagaaatgaaagagattggaagggacagaaattagttgagaagagaaaaagaaaagtctcctagccgaggcaagcactgagtgacactgtggagtctggctggtcctgacctcagccctgaccaggaagactgaacacagcagtgttcttccacaaaactgaagatcccttggtgacctcagccctgaccaggaagactgaacacagcagtgtccttccacaaaactgaagatcccttggtgacctcagctactggatcaaagccaggaatctagaaggaagcaataacggccctgaacaattgagtagctgtctgagtccccaaagtaaaggccctgctttatagccaaggcttcctttagttctcttatcacagttgtaacaaatattgactttaccatccagttcacagcagacctgaaacttgaagcctgaagggacctggcatactctgagtgctcttgctaattcacgtgtgctggaaacatcacaaggccatggcttgaaaatcaagaaagaaagatgtaaaagtcagaaactcgaatagtgtgggcctgaaaccctggtgaatatgctgctttcctcacttgtctccagacacatggtgcgtgcagaggggatgatattagcaataaccgtccaccagggtgacatccaactgcaggctacaggctctgcgcctcctcccagcttcctaagaaaaggcaagcactggtaagattgacgtcttgctggtgagacgctctccgttaagatgcccagctcactggctgtcctccctgctccctctcactcagagggtttctgaaagggactgtcattagcttctgtctccctcattctctgttctctcccatgcccacccaggaaacaaagcagttcaagagtgctgagaacattcttagatctttgctgacaccatgtgttcatttggccagaattctctagattcagggtagactatttgtctgttagggctgccatcgtagcagcagaataagtggctcaaacaataggacgttttatcactgctcagaaggctaatggtccaagaagagggtgtttgcagggctgttttcttccaagacttttttcctttatgcagatagctatcttctcaatgtccatgcatagcaccttctatgcacagctcatccttgctaaatcttcctcctgtaaggtcactgatcctactcttttgcatgtgtgtatgtaaggggtgtgcaacgataagtctttacgccatccactagagccctgccgctacctgggcgcccagaataacacacagaatcttatattaatttacagtgctgctggccaattgactaggatttcttatattctaattatcataaattatcagtcttaattatcataaatctatatattttataagacttatcttattgaggatgccttcccctggcatcctcttccccgggatcacatggcggctccatagataagagagcaggaggaagaggaagagagcaatttcctgcttatattctcaatctgcctgccatgtcacttcctgcctggatgacaagacttctttactacgtttcccagaatcctcctcgagtcctagtctcacctgtctggctttcctattggccaacagtactttatttatcaaccaataagacatacatataaacagaaggacttccccttcaggggggtttcaagataagttttccctgtgtagctttggaacctgtcctggaactcgttctgtagaacaggctggccttgaactcacagagatttgcctgcctctgcctcttgagtcctgggaataaaggtatgtgcccccactgcttggctatcctacttgtggcttcatataacctgaactctctccttaagacgcctttctccaagaacagccctactgggagccagggactcactctaattcatatcagataatggaccataagcagccagtgtgtattctttgggtggaggggtgcaggattctggcagttcattttccataattaacacaccttacaaaacatcacacaactcttaacagcaactgcttccttctgtgattgccatcattttaacttcggtggtttgaataataatggccctcataggctcatgtatttgaatgcttagtcaccagggaaccttttacagaatgagaaggactaaaaggtgtggctttgttgaaggaagtgtgtcactggaggttttgaggtttcaaaagcccataccatgcccagtctctctctctctctctctctctctctctctctctctctctctctctctctctctctcctctccccctccctgttacctgtgatcagaatgtagaattctcagctacttgtctgcctgagtgctgccatgctgccgccatgatgataatggactcagcctctgaactgtaagccagcctccctaccaattacatgctttcttttataagagttaccttggtcatggtatctcttcacagcaacaggacagtgactaagacattagtcaacatgcttccagcctctacacacttccatgtccttagctgttaattttttttcctcattctttgtccaaatcagagattgaaacagtgtttaaggcatcattgaatggaggggcccagacagctgtatattagtgttttaattttttagttactttctgagcagaactttggctctgcctgtaaatatcctctatgcatcatctccaggtgggattggattgtccctttaaagtactgttttcttaaatgtctcagtttttacaagattaccatcccagattactctgtttttgatagaaggctgcattacaagttccaactggagactaaaaactcgtgaacccaaatggttgtgccaaagctcagcttttaaaaagcaacaaaaccagctaagtaaaaactcattgcaatagaggtgggtctgtcttgaagggcacgtggctcgtctgttcccttcgatacctttgttctcagagatggagaagctggaagctggctcagaggacagcgcctgctgccttgcagagagagcaggagcatgtggctcctagcaccgcccttagtgggcgctcatagccacacataactgcatcttcaaggactcagactctctcttgtgcttccatgggaacctgcacacacatgctgcacatagaaacattcagacacgtcaaataaaacaaaataaataattaaaaatatatgtagacactaatctgcttccatcacttttacttccaagaaaaattgacttggctgtgatttttgttaagagtaactaatgttttctatattgcatgttgccctattttgtaacttggcacgctgtctcaagaatgaagagaagataaaatcaaggagcccagggatcctgcttataccatggatcatggacctgcccttgaggacataggcagggcctgggccaattagagcagggcagtgggtgccccatggtgtaggaagacagtacctgttggaagagtaggttaaagagaggaacaactttaaaataatacagaatttaggctgagcagtggtgccatacacctttaatcccagtactcaggaggcagagggaggtggatctctgcattcaaggtcagcctggtctacagagtgagttccaggacagccagggctacacaaagaaaccctgtttaaaaaaaaaaaaaaagacaatttaatgtttaaattaaatgcataaatgtgcattctttgtccagtgtaggatgaacatttttttctgtagcttaagttttctggttaaaactattctttatctacatgaatcacattcatagtcagaatagatttgctgctattcctagtttgtgttctgtttcatgaaaggagattataacaatgggaagccatctgcctgtaaagtcctatatttaattttaattgtgtacacttacttagtccacaccttgcagtttcattagcaacttatatctggtattttcaaattatccactttactttattacaaacacatgactggctggtttatgtaaagtgtaattgtgttggacagactccaaggcagtgcctgcctcctggcattcacttccgttattccttctccagatggtggacaaaaaaaaacatgagacttttcagacagcatgccatagggggaacgaagggatgttggtcccatggtcatgttcatggcacaaacagtcatgctaacaggtagcctggagaccctgagtgccagcttgaaaaaaaatgaaacttaaaattttactcttaataggtttactatgtgcccttcagtaacagaaaggcgggagggtgttgattcagaaaccttgttctggtgccaatcatgacagcaccaggcagcggagggatgctggacactggagggaagtccagcttggagcaaaagtgtcctgacataatggctgtcctgagaatggccttccttgatcacacatgccaacggccttaggagatgtctgtcatgtgcactgctgtgcattggccttcagttcctgtgggacaaccaaatgaacttactgagccatgaacttggggataaaagtgttgttctgaatgggtttagagtcagcagcaaactgatggtgtttgaagcatagtcaagcactcaggaagagcacattgagtgccaggaggaggtgagctaagagccgaagacccaggaagaggccttggcaggaaactgagaagccagagagccaggagcttgtactgtaggatctcaagtgtattgaaggtcgtggacaggtcgggcttcagaaacatacttcagtcaggcaaggcagtcttgaccatagagaagatgcattttatcctatttacttacttgtaacttctaattagtaatggataagtattacagacttgttaaaatgcttaaacgaaagtatgtgtgtacatgcacacacaacacaaagccctatgtgcttccttggtcttgtgtaggaactattaacgatatctaggctgtttttttgtagcatctaaacacaagtggtttttcaatgggatgcatttttattgtatttcattttgttaatatctgatatgaatacaaagtaaaatttacagccaggtgtggtggcacatgcctttaatcccagcactcagaggcagaggttggtgcatctctgtgagttcaaggccaggctagtctacatagtgagttccaggacaatcagctacacattgagaccctgtctcaaaaaaaaaaaaaaaaaacctaacttttaccattttgatcactgttgatgtatttgagtggcaccaactgtcattacattacattgttgctcacctccagaacactttacatattccctgactgaagctctgtgcccataagcagcctacccacagccatcttcctggctcttggcagcactgctctgcatgatatgctcatgactcgagctctctcttgtgagtcgtggtcatgtagttgttggtcttccgtaactagcttgtttcattcgatacaattgcctcaaggctcttccatgttgtgtgttggacttcctctgttaccacattttgcttatccgcacatcagaactctcgcttccaagtctctcagatgtgtagtctatagattatatggtgattctttttaaattcctttgggaatgctgttttccatgggactgtttcagtttccacagcaccccctcatctgacacagtcctcccctccccgtctaatgctgccttcagcttgttctctctggtcctattctatacgacacatcggtcaccctaatgagtgtcaggtgtcctcactgtggatttgagttttattcccctaatgactaatcccctaatgttgagcatcttttcatgctctcttaggctgttaatagatcattagagaaacattgcttgtggttacactaattttagattttattctgacaaaacatgtcttcacagattttctttttatgttgctaattcttgcttctcctattttcttggacaaatgcttgattttggttttagctctaatatttatgcagccagtataagggagaagatacagaatcatgctccttatagttcatgattttatttatttgcatgcatgtcatggtgtgtatgtgaatgtcagaggacaatctgtaggagtacattctctccttctactgcgtgggaactaaagcgtgaactcagccattaagattgacagcacccactgtaatcatgttactactgcctgacaagtcagacttctgaaaaaaaggtccatgtagatttttaaagttaaggggaaagaaaatattagcattcatgttattttgttttatttaacatctttatagccctccttttggggctggagagatggctcagtggttaagagcactggctgctcttctagaggatttgggttcccagcacccacatggtgtttacagacttctgtagcgctagttccaggggccctgatgcgttcttactgccttcataggccctgtacagtgtggtacacatgcatgcatgcaggcaaaacacataagataaaaagaaataaatatttattttgttttgtttttcaagacaatgtttctctttgtaactcttgttgtcctggaacttgctccatagaccaggctgacctcgaactcaaaaataagaaatcttaagaaatggtcctcctcttcctcctttcccatatcttaagacagagtctcactatgcagccaggtatatcttaaactcattaccttcttgcctcagcatttaagttctcagattatgggcatatgccgctgtgcctggccattttattatttaatattattctacaaatctacttaaaggtgcttctgaatctttcacaaagtgttggtcagccaaaagagatgatgtcaaggaatcagactccccaccaccaccacccacacacacaccaggacagcttgtttctgatgaccagacctcatggaagtgtctctgatgtcacttccatagtcttttcctctgcttctggacatccagagttgttgacgaaaatgtgagtttcgttatgtataacttatataccaaacagagagaccactccagttggtctcatcagaagccaggtctctgtgaaattagtacttagggctgagtggcatggctcattgtgcaagagtggaaccgagaaaggtctgtgcttaggttctgcctggaccaacaggtttgtaagcaagggattgttttcaagtggaatttcagttggtatttgcttgagttttctgttctttaagcaggaatatgtcgtatcttttttttttttaacagttgtttcgagaagtacgaataatgaagatactgaaccatcctaatataggtatgctatctgtacatataattaatgacaaagcatgtcccttcgtggaaaggcatttgaatgtgtaggattttactgatgctctctataagaagaagaaaagtgaaaactcagggaagatgatactctgtgtagtggtgcagccctggagctccctgacagccgtcccccactgctgtagcatctcctgcttgacaccacaaggcagtacagttggggttaatgcacacagatttctatcttcttgttaaatcagaaattggcatgtcatcagttattactagtgaagaattagttatattttgctaataaacagctgagtttaatgtagtgctagtaggcaaaaccacgttggtattttgaagaaaatagtaagttttgatttttccccctttacaaataatcttactgctcagatacattatgtaaaattacttaattctaagtagtaaaaagtttatttttaatctactttcttaaatgattgtcttgcatctttaaagattctccctgtatgcagccattaatgtgaccatgcttggtgaataatttccactgtgtaaatctagttctgtttttactaaaactttttaatatcacgtaaatagaggttttgttttattttataccaaacattaacactttataataacgtactgctgcaccctctctttctaagtactcatgaaaactctggttttaagatctctctttctctctatctctttttctcttctctccctctgtctctctcattctctcttctccctccctccccctctccctctgactctctgtctctctgtctctctctctctgtctcgctctttctgtctctctctctctctctctctctctctctctctctctcttgttgttgttgttgttttgtttgggttttggtttttgagacaaggtttttgtaaccctggctggcctggaattcacagaactccatctgcctccaactcccaagtgctgggattaaaggcgtgtgtgtcaccactacctggcaaaatttctctttttattatgttattttaactagaaaaggatatggctttttcttctcaaaaactgttttaagttataagttgactccagatcactttgtggtaaggtgtaagtagtttccttgcaaagaagtaataactctggagtgacttttttattttcaagttagaattattcagtttagtgagtattctaatattcttcttagtgttgtctaaggtctgcagaaagaacatccattttatgctgtcagttacaaagttgtatgcagtaagtcttcttctatcccaacagccagctcccaagtaatgacatggagatttataattaattataaagcctatagcttaggcttgttcctaactaactcttgtaacttaaattaacccatttcattaatctacagtctatcgtgtggcgttacctttcttctatcttgtacctcctgtttcctctctgtgtctcctcatgtttcctcttttcttcccagagtcctctctgtccctggaagtcccgcctaacctcttcctgcctagctattggcatttagctctttattaaaccaatcagaaggtgccttggcaaagacacctcttcacagagttaacaagtattccacaacagttatgcttcttcttttttcagtgaaactgtttgaagttattgaaacagagaagacactctacttagtcatggagtacgcgagtgggggtaagaatcagtaggctcagaaaccatgtctcgtttgataggacatagagtggatggtgcttggtggctcattataacatttatgccttcattgttattgtaatctgtagttttattaacatgtctttaattgcctcttagtgaaaattcaatgtttgctttcaagtccagctgagcctagaatataaataaaacttttggcttatttaaaaattacttagggactttctgaaatctactttgtcatcttttgaatgttttaatttgctgatttaaatattaaaacaacatatttgatttgtagctcaggaaatcccgagtgtaggatgtaataaaatctatagtgaaagcttgctctatgtcagatatttttttaactgactgctcacatatgacaggtctgcagtatataagcattgccaagataaccatgaatgtttggatttaactaactgttgatctgtctgttctgtaaattagggttgagctgatggaaagtggcagagctcatgtataacatagaatacagcatatactttgactattgcagggtcacaagagcactgattttttatttcatattgattaaataatagaaaatcacttttatctcctgcactttcccttaaataagagacacttgggccaggtgttggtggcacacgcctttaatcccagtactcgggagacagaggcaggcagatctctgtgagttcgaggccagcctggtctccagagcaagtgccaggacagcctccaaagctacacagagaaaccctgtctcgaaaaaccaaaaaaaaaaaaaaaaaaaagagagagagagagagagagacacttgattcaaaatatgattccattagggctcttatattacattttatggagttacatcattgaacaagtaacaatatttgaagggcatgatttaaaagtacaaagaacttaagcaattgaaaaataggggaactgaaattattttattgatttactatgtttttactaattgataggaaaacgttgcattgaacttagtataaggcccctccattagtgaaggctggggtctgtgtggcaatgcagatcttatgtaaactgaataaggatttattttgtctatggcatctaggcaacacatttttatatggcttctcagatttctaaactttattttaaatactgaacatgtataattgattttaacatgtttttgcagattaaatgtcttagtaaatttgcaaaacttttttctgccctgaaaatatttcagtgcaggtttttggtttgtttcctgatttgttcctttgtttgtctttggtggtgttgggcactgagcatggggccttatgctgggcaagtgcatcccagcccagcagtgaatctgcataaaatgcagctcggttacaaaacttgtaatcgctacctaatgagttgttttttctgtccttcagttatgtttccattcaaactcatcctgtcaggataggcgccctgtcactttcagttcagtaaaacgtgtttatcttatttgtttgtttttctccatttcggtaatctagaatttagagaaaggggttagacatgctttgacataagaaatgacaggcctctgaaggccagggtgcaaactttctgcttctataaaagtccaccacaggctctgcttgtaggagctgatcaactgttggtattaagtacagtcaactctcttggggctgggggcagggtgtgagatctggggggaggggcagtgaggagtggggcacagacagactgctgtagtttgggtttccattgctgtgaagagacactatgaccacagcaatgtttatgaaaggaaattggagctgacttagagtttcagagggtcagtccattagcatcatagtggggcatggcgctgtgcaggcggccacggcgctggagctgagagctctgcatctgatctgcaggcagcagaagtgaagactgacccatcggacatggctggagtgcaggagacctcacagcccacctccacagtgacacacttcctccaacaaggccacacctcctaagtgtgccactctctgtgggccaagcattcaaagtcagagtcagcggggaccacacctgttcaaaccaccccacagagagacaatgaaaacctgctttctttgagtcatacaaagcagtgactctgttaataagaataaccatggctctttgacagtgcttctaaaatctctttttgacattttaaatctattattggcaaggcaagtcggggaaataaaacattgaatttttcctctaaagtctccatatagtttcagatggaatgtgatatgcacagtagtgaccatctgggtcaggctgctgccactttgccaggtatcagtcaggggtctctgactgactgatgacaagtgtctattggaaagccatgggattcctctgtggtttcctgaatcatagtcaattaaaggaaacctgttaaagtaggtgttggggctcctctcacacagtatttagttttccttgtgtttatgcagatactacttataaatgcttacagggtgatcttctaggggctgagaatatagaggtaaacaaagatagagtcagccctgcagattgcgttgtaattggtgaggcagagcgttggtgaaccctgtgaacggaggaggattgagacatgcagggtcagggtgtgagcttgctaggcacagtccaagaggagaaccagatgtgtggtatttgaactcttaggtttaccttccccagcctaaactcatgtgtctagagttagcaccgtgccaggttaactggaattgacaaccattaccccatatccagaagcactaccctgatgaaccaaccagagcatccattcatttcttgttctcatcatcccgtttattatttactccacaagataaccatgttcgacattatagatgtgttagtttcatcaacgtacatccattacatatttgacttttaatattttacttatatcctagggaaatttgcatatatgccatacatctgtgtacttgaattaaaaatgtcatttattgagtactatatgccactgtgccaagcacgtgcattgtttcatgtaaccctcatagcaacccaagtagactctggtagaaacagaatcttcacggggttagaaagtcctgctacacgtacatccatctgcgttgtgcagctgatagtaagtttctccttacactgagggagtagttccagatttcaacttacgattaatgtttctaaactattatagactagagaaaaaattctaacttatatggagacatagatacatagattcactagaaaatttcagcaccgtctacttagtgttaatgagttgagcacatatttgttgcatgtccactctgtgttcttcatggagatgaaggtgcctgtatgatgtggctgtgatgggttgaggcagccagctggtcatctgggacagcagagtgtagacaagggtgataggatagtccgtgttgcttgcgggtaactgccaggatgtatgggcgcgtgtgaataagcatagtcagcatatgtacagacaagaattgcagagctgggccgcactgcgtggtggcatttaagagaaagcattgtgcctgctttgtagcggaggccacaaagccagagccaaattcgactttgagttccccgtggtttcccttcagtaaaatgggtaataaagagttgactgtatttcatgtaacttgtagagagcacatcttcttggttatttttaagaatttttctaaatcaaaaattgctatagattctcaattttttcctacccctgtgttagtttgtgactttataaatgtagcagaaggtggtagaccaagtggctcttggagagtaagaggccaaaacttggcattgcatatattgtgaaccaaaatcaatgtgtacttactgcctgctttgcctttctgattcaggtgaagtatttgattacttagttgcccacggaagaatgaaagagaaagaggcccgtgcaaaatttaggcaggtatggaaagtggttttcaactttgttttgctgtttttagtgatatgcaatggacagtatcacagacaactttgagagtacatgggattgttcaaaagaaaattctcctttcgtacacttttaagaatgggaaattactagaaaagagacccgttttccctagatttcactttaaaataatagttgcagatggttattttgagatggtcatgaatggtaacatttagtaagttagactcagtgtttacctttgaatctgaaacactcagatcacacacaaacacaaacacacacacacacagagagagagagagtaaatacccagccctttgatgtagccaaagattgttatcaagtcctgtttgatttatggtactttacatgtatgtgttggttaaagaagttattattttcttctataataaaatatatattggttttgaaactcatttcagtcttaaagaatatggtcagttttatttagctgcatatgtgaggaaactgcaagtgtggtagaggactgtggtggtatacatatccagtttagcatcagtgtaacttactgtagaaagaagaaagtgaaagaaggtgatttttttaaacacatttagaattttactttttaagttttgcagctgcattacatgtacttttatttttttacacaattttttcagaaaactcttgcatataagaaaattgcacactacaattaactagactgtaagtttacacatctcagtgaacttgtatatggttacaggggctggttggaacagaagctgtggcattttattggatttttatacttccactgttggtcatattttatgtacttatccaccaccaaaatgaaaacaccatgacagagttagaactagaaaaaaaattatctttatattccctttcgaaactcctggcccacacctgcgttcagtccttcctcaccctctaacatttagcttttcttgttctgttttctttatataaagaaaaacatgtgtatttgtttacatggttagattctgaatatgaggaagaacatggggagcgttattagattgtgtgactcacttaatcttatacattctaagtccatccattttattgcaaattttgtcagtttttacatttttctttagagctgaatagtattctatttttcatttatataccaaactttcattaactattcatgtattgttggacaactaggctgaaaaaatatactttataaattactatagaaatgactagtaaattgtgaattatctataaaatgtactgaagtaaggcttcagaatgtattatatcctagacttgaacttagtgaattaaattttttttattttaaagttagctcctcctctgtgaacattacactgattctgcatttaaaagcattctataaactggacagcggtggagcacatctttaatcccagcactctggaggcagaggcaggggaatctctgtgagttggaggccagcctggtctacagagcgagttccaggacagccagggctatacaaggaagccctgtcttgaaaaaccaaaaccaaaactaaaccattctgtaattagtcttttgaaaaatgaaggtttccataaggtcttcctctctggcagctttccacggaggctaactcattaactagagagaccctcgtcgagaatgaacccattcagcttttgacctgagcttccaaagagattgtgtggtagctttgtcttctaagtctctattattccagtagatccctatagttgctcctaagagtgggcagggacctataagatggctgagggagcaaaggcacttgccatcagccagacgacctgagttcagcccccaggaaccatgtggagggagggcagaactgactcctgaaagctgtcctctgccctcaacacacacgtcatgcttgaaagaagtctagggcagttagttttcaagatcctccctgctgcggggagctatgactacttaataagctttgcttccttgacctttaaaaaacaaaacaaacagtgcctgtgaaaacaactggctatgaggaaagcaatattaagagcctgggctgtgttgagtcccttcccattaaattctttcctgtcctggggtagagtttcttgctgtctggtcaagcactcagttatctccctccttgtcagctgttgtcagtagcaggtgagtaagaaaatgtttggggtcttcatgtataaagatgatttccctttacccattttctccttagcctgctggttttacttacttgctaaaatatggctagtaggaagtcgtacttggtgaaaaggctttgtgttgtagaagtgtacagtcaaccattgtggtgaatgggaacagaataagacttaggttaagatccttagccctagccaaaaaaaaaaaaaaaaaagtatatttccttgtatatatgactttttatattaacagtgaaagaatgaactacattaacaaggatatgtagcaaatacacacacacacacacacacacacacacacacacacacacacacacacacacacacacacacacacactggggctggggagatggctcagcagttaagtgctcttcccggggacccggttcagttcccagcacccacatggtagctcacaaccatccaaatctccagttcccaggggtcccatgcccttttctgacctctgagcattgtacacatgcataaaatgaaaataagtcttattttcaaaattatagtattgattccaaggtcaaggctactgcttagagaatcgtaattcctgaccgacgtatgttgttgcaaagctacccccaacaacacgtgtggagcctgaagggtcagcacaggcctgcttataaatcctgtcctgcttagaaatcctgttctcaatgtccacgtggaagggtcatagagaagcccttgcctcctgctggtgggatgttctcgggtggcagagtctgctgtgggccagagtgatgaaacatggactcatgggtggaggtccatgtggccagtcagaagccaaaactgttttcatgtcaggcatggtcccttgctaggtgcgtgtgatgacacgcattttctgtggaaggatatgggtttcctacagcattttcttatattagcttcaggtttggagcttagcgagattcttattccagaaatgtctatgagctggttgcatagagacagtcctgtcaggtgtgaactcatggcctctggtcacacttggtagccaaatcattgtagcacaccttcactgtgtggtgcagtgtgtcctgtaaaagacaactgtgttaccagcaagtttctgtcaccaagtgtagagaagtagcctggcactctgaacactgttccctctaaagcatgtccagtaaatacacatgcagacagaccctgtgactgacagacataatggcaccctgaacactgttccctctatagcatgtccagtaaatacacatgcagacagaccccgtgactgacagacataatggcaccctgaacactgttccctctatagcatgtctagtaaatacacatgcagacagaccctgtgactgacagacataatgtagagaaaattgagtgttacgactttgaagcaggactctccagaatcttacagatgtttgttgttgtgtccagctgtgcgtagggactcatactgaagatgctcatggcattgtcatcctgccccagacatttcatgactgcagtatttgctcagtatgaaatcctggaactttggccaagctgtctgtcaaagcttgattctatcaactctatgagaatatcattagtgtgtctcaccctttacccccactctcccttgccaaaaaatctcaactgttcctgtccttcaaggacaccatcaaccacgtgacacatccttcatgtaccatttctggtgaaaatcatttgctttcttgatccctcgctttgcacctctgcttctgtgagtctaccttgtcagctccataaggggagtgctcatgtaagtccagttttgtactccctgctaggaataagcacatagcaggtactcaataaactggcttagaatcaaacgaatttaattcaattatttactcattgtgttggtggtttgtttttttcagattcatgtcttgtctttgaacagttttaacatacatttgaataatttcccagcactgagatgccactttcattctgctctgaattccttgtcccctcattcctgttaacacagccatgcttcataccacctttagactttggggatctcattctgtctgcatttgtgaacagctaacccccatccatgccaggttcacgtttcactgaccccaccaccctgcgtgacaatgaccgccctttaggcaccagctataattacacatacagagtagctctttgtcagttgctaacgcctccttttaaagagtcatcacagaaaaacttataatctatttcttgtttgtattcaaggcctttgcattgctggacacttccctctctggctcttatccccagagtcctacacactggctctaactgcaaaatgtattgtccagctgaactaacggcaaacataatattaacttggacctcatttattgagtgttttcttttgagggttagtttttccctatttgtatttgagcaggaaatatgagatgttgttaaatacttctctgattggttcttgataaattaaggaaataaaccttgagcaaatgtgatgtaatcccaaatacactttgctttagccccagccagctgtcttgaatggtagtttacatatgcagggccctctttctacactaaactataaattatatgctttgactcgtgtaaacagagaaatttaatgggtatagagaatttctatggatgttgaccaaaaaaaattatagtatgttttccaaagagaatattacttcccacacttaaaactttcatctctttaataagcatagttttctaaactatccatgaaattgctattatttttgaagttagtattttattaaattgaaaatgataattatgaaaatcaagtatttgaatttcataaagtaattttgactttttatccaaatattttccagattgtatcagctgtacaatattgtcatcaaaaatgcattgttcaccgtgatcttaaggtaagtcactgcttttaaaattaaaatcttaattatgaaagtatgtattaaggggctgtggggctggggagatggcttgatgaataagagcacttgctttgcaagcatcagggcctgatttaaaatccccagcacacagtaaaaacccaataggactgtgcatgtctataactccagcatttggaggtggaaactggtaagtcctgggagctcaccggccggccagcccagctgaaacagccaatgtcaggttcagtgagtcatttgtcttaagggaatgaagcagaatgtggtatcttgggacactgggggtcctcctctggcctccacccacaacaccatatacacacttaaaatttgtcataataaattagggccacctctccagttacccagattctcgggcagaggatgtggtggtttttatagaattgtcaccatagcttgtgaaagacactgtgttcacaaccacatgaaaacgtggacatgacattgtctaacgtcaaggttagaggacttgactataaatagtgtattttaaatagataaatatggaatcctatcctcacctggaattgttcaaggtcccatctagagagaaataatgtcaagcacaaggcagaaatatgtttgccacatgtaagaaccagggttctttctcagcaccaaatttcaaaatgagaagaggtttcaatgtgtttatgtgtcggttagctttctgtcaccaggacaccaattagagtctttggggaacagggatcctcaattgagaaaacatctccaccagaatggcttgtgtgcaagcctgtaggacagtttcttgatgagtggctcttgtggggggtcccagcccatggtggtggtgctactcctgtccaggtggtcctgggttctataaaagagcagactgagtgagccacaaggagcaggccagtgtgcagcgccctccatgccctctgctttagttcctgtctccaggttgctgatttgagttcctatgctgacttccctcagtggactgtgtgattggagacaagaaagctaaataaaccatttcctctccaggtgttatcacagccatagaaagaaaatgtttgagatgtggataaactagtatactttggaataaagggtgtagtagaaatggttatggtcaaacaagctttaaaagcttgggcttaagtagtgtttctgctcttctttttctcctcttcctcctcctcctccccttctctttctcctcctcccgttctcgtcttcattctcccacagtcttccttctagttttctttttaacaatccccagggcccctatccttcactggcatcaaacttggatcctatttaaatacattgccttacacactggtcagagatctaattgtgtgtctcggctccattcttatgacctgtttacagctccagatgtttctctatcagctcttttctctggcagttttaggggaaaacatttctacaaagaaaagaaagggttacctatttatttgtttaattcatagcttaacacctcatttttatattttaaaaaatcatgttcagcaactatgcgttcagtgaagttcagtggagagagagttctcaaatatcccaggactgagacctcagcactgtgtgccggtgtctttggaggcagtgtggttacttagattcccatctagactctagtgtggagaaggtgggaaagtctacgttactacagatgatgagaggaggagacttaggtccttatagcagaaaggtgttttgttgttgctaggtccataaatattgatttaatgtagctctcccagatttgtttgttttcatagtatgtgtccactcatttgttgactagttggttgtttttggttttgttttcttgtgtgtgggggcggtgaggagttttggtgtgggtttggttgttttgagacagggtcctactgtgtagctagccaaggctcacctagagctttccatctcctgcctcagtttccccatgctgaaattataggcatgtggacagccctggccaatgtccccacaggtgtgactctagactttcaagttgacagttaatactagccaccactgttgcagttacactttttataacattaggtaagctagaacaccataaagggggaaaaaagaggagggacttagagaaaggagagaatcaagacaggccctccagtgaccacgaatcctctggttttcatcttggtcacattttactccttttttggactctggccaaccatcctacaaaccagcctgtaactttattagcctatttattcatcaattggaaatgggatttgaagtgaagcatgcactaaaaagcaaatcttcattatattgcttgcgtttatagaagacatttccatttttatctttgggtgattgatttagaactttaggaaaagcctctcaaacctaggagcagaacgtgactgtagataggagtctacttttagaacagcagatgctgctgaaaataaagcccgtggaagccaaattgtccatttgtttcctttcactgaacagtacttagctgaggaagtattttgtaagaaaggacagagtaaagaatcccggcgggcagtcagcgtagacataccctggagcctggtgtcaactgcctgttacgatggccatcctgtaacaatattggctgaagtcagtgtgtatgccttagagcaggtcctgctaaggtacagttacaagatgcttcttaccatgaagttaaaaacgtttaaaataaactgggggaagatgtgttttaaaataacctttcttaaacagttcctatgagcgagctttccttttcaagtgttaaaatccatcttccacagatgttatttggacagctctgcgctacagaatttgatgttacattcttaaatgagaggcacgcacttagcaaacttagaaccggaaagaagtgcagcagacatttaaatttcctgtgcgctttttacattgtcctttttattatttcctcttaggctgaaaaccttctccttgatgctgatatgaatattaaaattgctgactttggttttagcaatgaattcacagtggggaacaaattggacacattctgtgggagcccgccttacgctgcccccgagcttttccaaggcaagaagtacgatgggccggaagtggatgtgtggagtctgggcgtcattctctacacgctggtcagtggctccctgcctttcgatggccagaacctaaaggtacctgctgttcggtgctgaagcctcatccccaagaggtgtaatgtcagccgccacttacaaatactttccttctttatcaaaggaacttcgggagcgagtcctccgggggaagtaccgcattcccttctacatgtccacggactgtgagaatctcctcaagaaactcttagtgctgaatcccatcaagaggggcagcctggaggtgagtgtgctgtgttcaggagcatgctcagtacacagcataggtgtggttctcgccccatgacgccgcagagtgcatctaatttgccttttcagcatcacaagtgatggctgtggttcaaaaaccatagtaggtctctcaaaggcttatttcttcttggttctttggtgcattattaaaactgacacaatggaaacaaaggtgattactctgccccaagacagggtttctctgtatagtcctggctgtgaactcactctgtaggccaggctggcctcgaactcagagatcagcctgcctctgcctcctgggtgctgggattaaaggcgtgtgccacccatcggtatggaaaaatttacagacatttgagcagagtatattgaggctggtgctttccatttagcacgctactgttgcccacatagactctgcacgtattcttttgcataccctgtgttgcagaaccagcagaggttcttgtgaccaaggtgaccgatctcttttccttctcacactgtaattgggataagtaatgatcttaagcgttttttcccatctgggtcttctttggtttttaaagattgattgattgattgattgattatgtgtccgagtgcctgtgtgtgtgtgaattgcatccatgcagtgccctgagaggccagaagagggggtaaatgccctgtaactggagttacatgtggttgtgagctgccatgtgggaaattgcttttaatctcccagcaatgccttccgccccttcccatctgtctttaggaatgttttggcctgtactaagaaagtttcagagactcagtacccactcctcacttggactcttaacgtcttcctgggaagacggggaactcagagacgctcctgtgcagtgttgttttactgggggctttctaacacacacggtgaggttcagcccttctccctgtgctcagctcagcgagggcttcctcattctgttcccatgcatgctttttctaaaagacacggtatgttttggtgggagttgaaaacttaggtaactaagtgctttgtaggagtggattaattggtatttttactttgttatttgtttaagtgtggttaactcttagctcaagttttcttgtgtgtgtttttttctttgggggtgaaaagacatgttgatactgacgtttgtaatgaaagcccatttctgtattctgtttttctcagcttacttccacccattcatagaaagtgtgtgtttgctcagaatggaaaaccttcacccattcatagaaagtgtgattgttcagaatggaaagccactgacttgccagttctgagggtctggaacttcagagaacatcagcctctgctgttccacctctagggtctgctttttttttttttttctgagatttatttaaatcaagcatatgtttgtgggtgtggacatgggagccaaagaacccagaacatcactggggagacagggctcacaaacctctgtgggctgctaataaaaataagtgtgcttccccgaaagacgactgttgactgctttaaattttggtcagagtagttctcccagtgttttattcccacatcattaagagcccagaagttacatagacctcatggcccaggcttataagcccagctactgaggaagagttgagggtcaaggctatctcagtgactgagcccctattgctcaacgggggagcctgccctggcacacacagggctgtagtgcaaacctcagtgaagccgtgagtgttaaagctctagagtgtatggagttgaatttaaaagactaattattatctaaaaatttgatcttaccacaatgagtcccattatcttgtataacttaatatatactattgctaatgatgacaattagactttttaaagatttatttattttatgtgtatgaatattttgcttatatgcatatatatacacacacatacatacatacatacatatccactacctctggctcttataatagttctacttcctcttctacataaatccctgagccttgaggggaaggggttgatgaagacatcccttttaggactgagtctaaaagtctctcactctgtacattgtcctgttgcgttaattactgtctactgcaagaagcagcttctctgggcatctgtatcaatgtatcatcaggagtcattttattgctatgtttctttagcagagtcgtagtagtaggtttttccctaggcccatgacttatctagtctcaggttcttggccactttggaagtgtctggtttgggaaccaactcaaggaatgggccttaaatccagtcaaaaggtggttggctactcccatgacacttgtaccactgtggcactgatgtgtcctatacatttttttagaggaaggatttcttacacaaaccttaaacctccttgaagtagcagtctcatataatcttcattatattttattgttgttattactattatttttattgtttgcagcataaatatttgggggtggggggcaacaacaccagtcctccatggccaccagcaagttgctcagctcttccctctcttgtcactttgtggcccctgttgaggcccagctatggagtagcacaggtccatggcatggacagtaagggttgggggacatgacactggctgagtcctgccctgcatgcccttctgccctcatgggagccccaatggtggtaaatatggccacaacttaattcttatttttttatgttttgaattttatttattgttatgtgtgtgacaacttaattcttatttttttatgttttgaattttatttattgttatgtgtgtgaatgttttgcctgcatggatgtctgtgcatcattccatgcctggtgctgcagtggccagcattgggtcctctggaactggagttacagatggttgtaagccacatatagggactgggaatcaaaccaattcctctggaacaacagccagggctcttaaccactgaaccatctttccagccctttgtaccaattacagttaataagctttaacattttgggtgggctgtaaacttgtttaaaacagctattttcaaaacactcctttgtgtagctttttagccagtagtagaagttttggggtttgtgtgctgcttagattttataggtctctgtacatattctgatgtatagatagatgtagctattttctcccactcagtgatcaggccccactgggctgtctttaacagcccagggctgatggtcagtccccccgctggtatttgattctgataattcatgccagcacctgtttcactttgattattacctaatttctgattctggactttaatgtctaccaccatcccttcccatagtctttgagttaactgactaactagcctagacttccatcccccaagataccctctttatgaggagcaggattttaaaatcaatgcacgaatttgataaaagagcaggaaaaaaataaatctttttattaatcttatatacaaaaacatgaagcaaaagctaaagccgggttctcacattaaaactgtgctctgaaaacattcctttttaaggactgtggaaggggggttgcctgtgcatgacctttggtgatttctagttaatctagttgtgctgagatcctgggtaccctgggtgagccgacttctgttggacggttaattaaagtacatggagtaactttatttgaaagtgtcatgtgactcttgctgagtgaaccaataaatttcacatttgaggagtgggttggtgttgtaattcaccagacgtgacgtagagtttgtttcccagcaaataatgaaagaccgatggatgaacgttggtcatgaagaagaagaactaaagccatattctgagcctgagctcgacctcagtgatgcaaaaagaataggtaagtgtttgaatacggtgagaagcactgccatagactgcaaatgggtagcatttatatgggactgtgtattttaacatactttcattaccaccttaacggcaaacactaaagtattcaagttccttagtttgttttcatgcctatccatggtcctgttcaattattggcaactataacaaaaaccaaaataaattagacgaacatatttttttatttatttttgctctccctcactggaagaaggcccactataactgttagcactgagcagctgaaaagtccagagaagtccaggacactagagtctaaactgtgggcatgttgcctctccctttcttctctccactcctcacaagagtctaccctccctgaccccagtcctcattaagaacttgatggggacattgtgggtgtcaagccttaatagaactgtgtatgcagatgagaaaggaagcagaggtcttgaattgaggagccgaggatgttctgagagagagagagagagagagagagagagagagagagagagagagagcgatagcaatgagagggatagcagagagaagagtgggcatgtgtgaggctcaaacgttgcctgggcaaaggaagtcagctcagaaataccccaggaaatgagaattgggtgaatatattaaataatataataaattaattttattatatataatcttattatattaagtaataaaaacaaataattctgcacacacaaaaaattagaaatggggctggagagatagctcactagttaagagcacttgttgctcttgtagaagacccgggttcaactccctgcacccagattgtgtctcacagccctctgtaaccggtcccaggggagctgatgcccttttctgacatccacagacactaggctgacgtgtagtcacatagatgcatgtagacaaaatacttaaataaatcttaaaaattgtaaatgtacagttaaaactcactttgaatgttttaagaactagtttttcctaacataatagacaaacctatagttttgctaattatttactaaattgatacatttttagaaaattttctgttttttccttttctagacattatggtcaccatgggttttgcacgagatgaaatcaatgatgccttagtaagtcagaaatacgatgaagtcatggctacttatattcttctaggtagaaaaccacccgaagtaagttttttgtctttttaaattaatattaattaattcttgaattaaatggaaaaagatatgttacttaatgtatttgcttctttgtggaaccaaaaacaacttgaagaccctagcagtcttattagagatcacgattcagggtggaaagttgtataccaatctcattaggaaggagcaggcccactgccttgctgggccccaaaagctccacccacagtcttaacttcgagcatggtgtccccaggattagttgtatggtgcacactgtgtagctaaaggcagtgtgattatcgtgcgtgtacagaaatgacagggactaaagcaaagagaacatgagtatctgcaacagcttatatacacaagacctcagaagaaggtgctttgtggtgctggcctgttgtctgtcgggggctcttctggtggcccacgggggtccatggtaagaacagatgcaggaaataactgtatgccagtggcgagctacataagtaaacagtcctttggggaagcagctgtaagggaaagactgaaacaggaacagaggccagagcattgagagttgaaaactagacatctgtgggaggcattctgtaaaaaaggctataattattcataattaaatactaactgtgaacaaaatcatacattccaactgaagtttattggagctgcctctgtcagaactgtgctgacagctgacaccatgaaggaaaagcaggaagttctcgtgtcccggagcccttggtgtaaaactcagcagcctgcagcatcgttcaccgtggggcgtgctgcaggtataaagtccaccacagcggtctgtgtggcacatagcacataaagctgatggcactgggtgaccagtggaaggcagggtgagctctaatctctcacagtgcctgtaaggtggctccttggaagaagctagctcagcgcagggcggtgggaggagaatctagttaggcagcacttgaagaggggtctccaaggccctggcaccaggggctgtgcacagtatcaagagagctaggtggggatggcccaaatggttatttttagcctcttctgactggtccttcttggatttcaaatggcctccagcactttaattttctgactaaatttcttattaaattcacagtccaggcattatattaaaataaaatatgaattgtattggaaataaactattgaagctattgagaatggaaagaatcaggtccatcagagccaccaactatgtacttcattttctgtgtctcggtttttaatctgtaaaatatgggcaataatccttagctcttcgagccattgaaaaggtttcatagttaatccctggcacaccttagaataactgcttctgagtcactccaccgtcctgctgctgtagtcagcgcattctcacgccttcatgaacaccctgacttcccagggcaatgccagcatggactccatccttacagcaacacccagctttcagattacagaggccgcgtgtgtcagccctcagtgtgccatggtcagtgctagggaagctctcctcatcagagccaaacaaacaaagtttgttttgtgaatgtagaacagcaaacaaaacagattaattttagttcgtagtgtataacattgttattttaagtgtgtgtgtgtgtgtgtgtgtgtgtgtaagatttttagattgtatcctgtttgaatcccagtgatgtccttgaccttggtgtttctgtccggaaagtgcaggttaatgcatcacaagtttgtagcaatgattaaacaaagcaacatgcaaaatatctaaggactgtgtctgctatgtagttaccttggtttgtggcagttacttgatgttttgactaaactgaggaattgtgcacagtaacagattacaaatactaatgggagcattctgctacccagctccctccctcctccttgccagtttgaagtctgttttctttcattttgattgttccttatatagcttcaaatcattctgtttatacaaactcttcgctgttttaaaatatgggtggtggctcttctcacagtttgaaggtggtgagtcactgtccagcggaaacttgtgtcagcgatcccggccaagcagtgacctgaacaatagcactctccagtcccctgctcacctgaaagtccagcggagcatctcagccaaccagaagcagcgtcgcttcagtgaccatggtgcatgagcaagtttaatactgagagacagactagctccgccccggtgtgtgtgcatgtgtgtgtgtgcatgtgtgtgtgcgtgcgtgtgtgtgtgtgtgtgtgcgtgtgtgtgtgtgtgtgtgtgcatgtgtgtgtgtgtgtgtgcatttgtgtgtgtgtgtgtgtgtgtctgcatgtgtgagtgtgtgggtgcatgtgtgtgtgtgcatgtgtgagtgtgtgtgtgtgtgagagagtatgtgcatgtgtgtatgtgcatgtgtgtgtgtgtgtgtgcatgtgtgtgtgtgcatgtgtgtatgtgtgtgcgcgcgcgcgtgcgtgcgtgcatgcgtgtgtgtgtgtgtgtgtgtgtttgtgtgtgtgtctgcatgtgtgtgtgtctgtgcatgtgtgtgtgtgagtgtgtgtgagtgtgtgcatgtgtgtgtgtgtgtctgtgcatgtgtgtgtgtgtctgcatgtgtgagtgtgtgcgtgcatgtatgtgtgtgtgtgcatgtgtgcatgtgtgagtgtgagtgtgtgtgtgcatgtgtgagtatgtgtgtgtgtgtgtgtgtgtgacagagtgtgtatgtgcatgtgcgtgtgtgtgtgtgtgtgtgtgtgtgtgtgtgtgtgtgtgtgtgttgcccaacatacacttccatttcctttcgctcctagcaccttctcacagatgtacatcattagaccatcaataggatctcttttgaggagacccgaactgatttgtgtcatcaatttcatcctagttgagagtgtagaagagcacacacgtgcagatgttttaacatagaaggtctttgtttcccagctaacgttgccattcctatacattgcagccggtccctccattccccccgctgtctcgtacaccaaaagacctcaggccaacagtgtagaaagtgaacagaaggaggagtgggacaaagacacagcccgaagactgggcagcacgattgtgggttcaaagagcgaagtgacagccagccccctggtgggtcccgacaggaagaagtcttcagctggcccaagtgtaagtcagagcctctcatgaagaaaacggtgcagagaattctttgttgttgccattaccattgttttaagatgtcccactgtgtagctcaggctaacctggagcccacagaaacaatagtcctcccacctcagcctctccagtgctggggttatcggcaagagggcaactggctaaaattcttaaatgggtagcctcactcagagggggacattagaccctgctgtgtgtcctgcctctgtggaatttattaatgttacatcagtgcatttaatcttacatgacttacctcctatgaagtctcttaaaatgccacactctagaaatttattgggagctagaagagagatcacagtactgtcctgtgaggcaacaggaaacaatagagatagggaaaaaaaaaaaaaaaaaaacggagatggaagggtgagaatagggtgggtaacatctagatagtagtgtcttgagtacatgagggagtagatgtttgaaggaatgataacactgaaaagagaagaactgggatggcaaacggaagctagaagtgtgctcccggactggctaaagcagattgcgtggacacacagaaagcaaggcgaggcatgcttagagatttcagtggagagctgatgatcacaagagaacaaaggtagattactttcagattggccgtcagtagtgttgatgccagaagatgcaattcgagtgtaaactttcggggggtaaaagagaagtattttaggcctagaattttatgtctagccaaactgttacttaaatataaaataatgataatattcctaggcataaaatgtgccggctatttgtacaatgactagttaaaaacactgttctacttaagaaagtgttcttacaggaaaagaaaaacataatatgttggctgtaaagtattatgagagttaaaagtaactctcgtaatcaaacatcttagtaagggccgtgagatggctcagtggttaagagcacttgtcaccatgtctgacaaacttgagcctcatccagcaccccagagtgggaggacacacatatgcacacatgtgtatacacacacatacacacacacacacacacacacacacacacacacacacacacacacacactgaaaattctgagcaatatccagggaataaggacaggacagagattagaacataaacacagcgggtgaggacagggcagagattagaacataaatataagaaagaagaaaaaatggatcttgcttatgtgagagtctaaccaattaaaattatgctatgaagtttttctaataatagtttaaaattcatttctttgatttcatactaatatagttaagattttaaaatgttttttctttttcttaaagaacaatgtctattctggaggaagcatggcaaggaggaatacatacgtgtgtgaaaggaccacagaccggtacacagcactgcagaatgggagagacagcaggtgaaggccactgagccctaccacagcgtttccctcacgactgcagactagctttgctgaaatgtctgtaggtgtgtgggtcacaggaaaggaattcagaaccgtagcctgcaatagctgttcttactgaagtgttccccttgtcaccaggatggaagggggaaagtgtacttagggaataagaagcaacttctcttaatttccaggtttctgaataaaatatggaagtgactatttctcggtacccaagtggcatgtacagtcccaatctgacaggctgactctttctttccacatgtaccctgtttcatcatccctctgcccctgacccttcgaccaactcttattgtacccaaataataaaggtttcctgtctaccctctaatgaagtgtagccgcctcagctcaacgcagagccacaaattcctactgagttttattgtagttggaaaaaccactcattgcctcagaaggatgaggcacctgtggcggcgacactctgttcccagctccagccattcaacagagggacagtccgttctcacagcactttcttctcccttgtaggcagggaaagtatgaaactgtgacattctttaggcttggtggtttgaagttgatttccaattgtttactgtctcctataccaaatgctaatctgtggctccttacacccacagtggctagcctgttcttcataacgagaaccaatatgagcggaaggaggggttgtctacagaaatggtggttttcatagttatgagttctcaatgcttaaatgacataggaagattcatagcaacacatcacacaaaactaatcttagaataagtgaagaatgtctccagcagtaatcatccagtctgtagctgtcacacatccataaatgtgccctgccttctcagacttgtaaccagaacaatgtctgagagcttttcagggcacacaccttaaatggagagataatttgttaatcagtaggacatgttcattgcttcaagtgttgcagtaatgaaagtgtcaattgatggagatttaggaaatctctttcctaggttttagtaactgtaccttttcttttatgtcaagccttacagagatgtctgccagcagcatgtcctctgcaggttccacagcagcctctggtggcccctcagcacggccccgccaccagaagtccatgtcaacctctggccaccccattaaagttgcactgccaaccatcaaagatggctctgaagcttaccggcctgggtgagtcctgcttacattgacctctctgtagtcactcctcctctagagcacttggaaaagacacagtgacaggaaaatgttgattgtgatacacacttattgtgtgttagcagtgatctaaaactacttgaaatcatttttgagaagaatgttcttaaaggattatactcctaatccatccacaaatcattgctgcctggttgttcactaatagagcagctactgagaaggatccacaggtggtaggtgttaccgccaagcccaataacctgggttcttttcctgggatccacagagtggatggaagaagagaatcagctcttgggagttgtcacaccgtggcaggagcacacatgcacaccaataaattaagctttaaaaaaaaaaaatcaagacagtggtagtgcacaccttcaatcccagcttttaggagtcagaggcaggtggatctttgtaagttcgaggccagcctggtctatgaagctatttctaggacagccagaactacacagagaaatcctagctggaatctcccccaccaccaccaacaacaaaaaagacataaaaacaaccccggctaggtgctgtggccttgggtcctagcagtgacattgtgagtggggcagctgcttgggcataaacttcaattcacatttctgagttttgcctcttgtaggatttctgaaactcagagcatctgaacatgttatcacttcagtaattagattttgtcagtcatgttgatagcaccatgtagcattgaattccctggggtctaaagtagaaacttggggtgatgctataaaaaggctttttgacaaacaataaaatttattctgtgtgttgtttagcaatgtacattaaaaatattcaaattgagtaccccttacctgaaattcctaggtccaggagccttttggattttggacattttccaattctgcagtatttgtgtgtacataatgaggtagtccaataggacatgagtttagacatggaattcatttaggttgttggcataacttacatgcagagcctaaagatatttcatagttgtttaaaaagcagcatgaggaagatgctgtgcaacagaactcaggggtttctgattagggaagggggagggggaaggagggagactggagactggcctctggggacgggagagcagaaaaggagagagagagggagggaggggggaggcagagaaggaggggaagggggcggggccgctttaaaaggaaacacagtgaatgtgcacaggtggtgctcttagtggctgcagctgagggcgaatcctgtcagaaccccaacgacaggccagtgcagacgcctgaataccaacagtagtgttttcagtgcacttcacaccaagtcacacatggaatttgtatgtgtaatgtcatatcaatgctcaaaagatttttggattttgaagcatttagaatttaaaatacttcagattacatagtaaaagcatatgtgcagcccccaggttgggcatctcagactctgacaggatttgtcttcactgacaggatttgtcagtgacttcttcgtctttaatcaccaaatttcacaaacagtatatattttaacgttatctcccatccttgtatagtgatataggaaattaattgccccttgcccctcatttctaacatgaataaaagcattggaccaacagaagtagccacgcttttccctccccaggttttaccctgagtgaagctgctcctgtcatttttctggataatgcatcttaatttctcccagcagtacaactcagagagcgcctgctgcttctccatctgctcacagcatcagtgcctccactccagacaggacccgtttcccccgagggagctccagccgaagcactttccatggggaacagctccgagagcgacgcagtgcggcttataacggcccccctgcctccccatcccatgaaccgggagcgttcgcacatgccagaagggggacctcaacggggataataagcaaaatcacttccaagttcgtacgcaggtcagtgccttcaggctgtggtggttttctctgcacctcactaaagctgccctctacaggagctgggagtaaaccactaggaagaattagtctttttccttaagggagaaaattaaaaatgggagaaaatgagaatctaggggctggagaggcagctcagttgagagtgttgtgaccacccacaaagaccaaggtcagtgccccagcactcgggaatcggttgctcaggatcaccctcagttacagaacgcatctgagctcagccctgtcacaaaaaaataatagaaagcttttgtagaatagagcaaaaaatgtgacattaaaaaaaaagattcgccaggcatgtgcacacacctataatcccagcccttgggaagcagaagcaggtagatctctgtcagttcaaagacatacatagtgagtttcagaacagcaagggctatggagagagaccctgcctccaaaaaaaaaaaaaaaaaaatttaaatattacattagatttaaaatgtttttatttaggaaaaagaattaaatgtaagttcatatgtatctttcagaaataattagctaaatttttaacattatttatttattgaggcggggaggggacacatgccatactatgtggacaggagggaatcaaagcacacttggaagaaccagttctctccttccaccattttgtttctggggttgagctcagagcatcaggcttagcagcaagttctgttacccacacgagatgaatatgtgtttataatgaataaatttattatctggtgaaatagcacaactgtacttcatacaaagtagccatgcttatacagtgcacagtgcacctagattatagggttgccatgcaaatgcatctcatagaaatctgacccactgatatcactgcatgtgatgtgagccctgttacatgcacaacactgtgctaggcaagggctctaaacacgaagagggtgatgtctgtgtcctccagagtcttaagaagtctgtaaaccactagctgtggtctgaggcgaatgggcctagcaagggaagtgtccaggggaaggcatgattgcctgaaggtccaaaccatgccgtatgagctaagccttagatcataatgaagaaattacgatgcttgcccttgtctgatgttcctcgtatttcttggagaaattgtgcagacaaagcaccgggcgggggtagagaagagcagcagcctgctccctcccacctgtgagtctcttgtgtagggacacacagcagagcgccaggctccagagatggcataacgtgtattatgataaaacagtgagaaggactcacacctaaccctaatgaagtttacttccatgtcattttaactatgggtttccttgatctccttttgcttttaaagttgttaaatctcagccttctctttatttttgagggatccaagtgaaggcgaagccagcggcagaagcgacacagccaggtgagccacaggggccgggtgctcccacacctggtgacgggggcggggtgagaatttgttaacatctgcactttgagtctctatattcagagtgtggtcggttttcctgttgtcacctagcactttggaagttcaagttcatcaactcaagttcaacaaactttgaattgcagacttggtaaagactggggtttcctgctctgtcagatgagtgagagggagcagagggattcataggtgcaggtgtgctgttgtcttctgtgtgatgtggggtcactaagatgagcctgagtgggcagagcactgagaccactagacagcagagggtctgatgatagtgatgtatttaggtgagcattcagccttggaccacattctaaaatgtggctctgacacactttttgggttttccccaaaggaaaatagagaaacaatagaataaatactttctatgtccgtttaatagtctgtggatgtatttccttaacttactctctattttctgaagatttcgattcttagcactttgaggttcaggtatctgggaatgaaaggaactaccttttatgttcctttctatagttcataatatttcatatcttacacatacataaatgtatatgtgtgtatttatagaaaagacatgtcttttaaagataaatttttccttaaatcacaaacaagtgggaaatgtttataggcaaaaattgcagcatgtctatatttagataactatttaatatttaataaaaggaactctgaatcgtggaaatccattaagttcaccctcctatgcttatgtgagctggttttctggttctgttgtctgtgtgatacctaaaacagcgatattcagtgtgttggtcatctcttgtgccagcaaggttgcggatgcctggggtgtatgaggagtgaagcaggcagatggcctggagcccacaatacaggagaagtcgagtgatgtgtaggaagcctactaagtggtcagttagtgtactcggatggcatgggtaggggagaaagcagaataagaaggcgtggccgtgctagggcaagagtcctgtggtcagggactctgacggagaaaacaagcaaagatggaaaagagaagggaagtcctccatgttgccttgtctgtgtaggagcttggagaggagtgcacaggccttggtcaggaacagcatggaagccccccccccccatgtcccagtaagagagagcagagagggaagcgataggcaaggggtggaggccacaggctgcctcctaagccagtttgcttatgctttagagacatggcaaagagcagagcaagcgtgctgctgagacgtcacgactccactgccgtctgccgtctgcctccctcccgactgaggctggaacctctttccttctgtagtcattgcattgctcccacacaaaaaggacagaaaagggaatctacgtttattctaatactgcgtttatcaggagaatcctagtggtgactgatgtgtgtgtgtgtttgtacaggtgtgtgtgtgtgtgtgtgtgtgtgtgtgtgtgtgtgtgtgtgtgtgtgtctttgtacaggtgtgggggcctgtttgtgtgtttgtaatatgtgtatgcacagaaaacgaagaactattaaagtttagctttcagctgcaaattccttttcagaaacaaacgcacttaagaaagtttgctgctttagactagggatgctagttgccaagtacatagtgcctctgggtctgttgacaagcatagtggtagcatgcatctccagtccctctgagggctggctgcagacctgacagtccattaggcatggagctatcactcactgttatggttgtgacttctttgcttagtagaacttttgtttttatttttcccctttgccctcttccagaagtacatcaggggagccaaaagagagagaaaaggaagagggcaaagactccaagcctcgttctctgcgattcacgtggagcatgaagaccaccagctccatggaccccaacgacatgatgagagagatcagaaaagtgttagatgccaacaactgtgactatgaacagaaagaaaggttcttgcttttctgtgtccatggagatgctaggcaggacagcctcgtgcaatgggagatggaagtctgcaagttacctcggctctcactgaatggggtccgcttcaagcgaatatctgggacatctattgcctttaagaacattgcatccaaaatagcaaatgagcttaagctgtaaagatgtctatgcttcagggtcagggaagatgcacccacatctgcggtacaggttttgaatgtactggtgatgcgtaatgtggtcctcctgtgaatctcccgtgtagaactcgtccttgatgcaataaggttatacatagttacaaactgtaaaattaaagtccgtatgagctataataagaatctgtagcttaaaaagtaggcccacatgtacaggtaagtatattgtgtatttctgttcattttctgttcatagagttgtataataaaatatgattgctttaaaacctgtatacctgtctagatctccacacagaaatgtgcggtcaatgctttcagttgaaaatggtttcctgttatttacactttggtgggtttttaaaattctcacctccatcgtgctattttgaaaattgtgtccgggattaaaagcgcacagaaatcgtctttaaaaactgtagcatgaactttataaaattatttttaaaatcatatttaatttaaaccagaaattgacagtggtcagtgtcattcagtttctcctgcttttcttgctgtcagcctgtgtcaaacaagcgtggttggggaacacacaatgtttacagtgtcggcacctagacttctaaacaagcgaaaagaaaccatagctttgaaaggccttgggctaagtcagaagtactgaggtaagaaattcagtcttcaccaagtttattttgccctttgttttctgacctgctaattagcagctgagagtgaaagaatccatagttcacctggctgttgtgaaacaaaccagcacttaggtttgctgccttcggaacgcgcagggtaactcatagcacaagctggtctgtacagcgttgatgaaagcgttggctaagacaggatgccgcctcaggacctgactgcattgggggcatttgtcccgtgtcttcccagcctccatccacccaccacccgtaccacggcagactgcgagtactcgagagacccaagagcaagacgcgctctccacaccacctatcacggatttatgctgcccgggtggtccgctttgctccctcagaacccattcgttttctatattccgcccaagttctcatttttcttccacatcattgtgcctgtaacgcgccactttgtaactggtcatttgccttctctcctttcaaaactggtgacggatgcgacgtaaagccgctggtaacggtacctttttaacacttactattttgtactgaaaagccttggagggtgactgtgcgatgctatttaatgttgtgacttactgtaatgtcagcatatgggccccatctgcacacccctgagaaacagaaactgctctcaaagcttatcattgaaagaaaacaggctgtcgccgtgctcgcattgattgggcgctacctggaagctgccggtgtaggcgatgggctgtccaatggcttccagacaaaggtggcttttttcttctgtactgtactgtgatgtagctttcttcttaacattctgttccaaatgatgtgttttcttgccttagggaagggcggcgttgggggagcaacaaaacaaaactgtgtagcccctttttaacctggtgttccctccgaacatccgatgcagctccgcgctcattctcactggtgcacactgaggtctcacttgagcagacctcataataaagcatttgtctttggctctttgtcgggtcgtgaatcacctgttgtctgcttggagggccctccgagtgtgtcctctcctgcgcctgcgcctgcgcactggacaagcaaggggtgaggctctgtaggttctcgagatctcattgtggcaagaaagtgtcgtctttttacaggaattctggtcgcggaaatgcttttcagaacagaggccccaggcgtcgtccccaccagaggcttgggtgctctgtttttctcactccagccaaccccagtgctttatgggaaggaattttatttccgtattttttatgaactagaaatgaaattttgacattcacttcatattatctgttttatgtgtccatgataacataatatttcaaagacttgggaattttaatgtttgctatatgatagcaggatttccttggctctgtggaagtagcatttgatatgatatcccttgtatcatttcttagaaaataggacatcgtactttaacagccaaaatttaaaaaatagcaagataaagatgaaatctccttcagaactatgacccagtaatattctgtggagtaaaatttgattttaaacactaagatgttattactggtgattgtcaatgaaaatgccactccacacccagcgtcctgggagtgaaagatgcacttggcctgttgaaattaacaagatgctgtctgccttgtttttaccatacattacacttcttaagaagtgtaatgccactgtatagatggttcccacctctacagcacggtgttgtatttggggagcagacagaaacagtacacggacaaaaagataaatgggtatcactgaaagtgcctccctccaaaaacataataaatgaaaacacagggaagagtgagttccaggtaaatagtagcaagggaagttggagtgggaaggagcctaggagagaagggctggctaggcagagctaaggaacaggcaggagggttgctgcaagtttcaggccaaccggggccacatggtgtgagctgtcccagcaaacaatcaaaattaaacacaatgtactggcaacttcaagttgcacttaatcattaattcagcgaatttattaagtgtgactatgcagcatcaggttctgggttctagggaaacagccaataacaaatctacaatataaaaatacagatagaacatatagataaaggcttaaaggacagaagccttttctggaggagagtggaggcatatgccacagacgttgcaacaaacatggcaagatgctgtaagagggatctgcttttgcagacattgtaatggaccagctacacaagggtttgtccccttagccctggacttggtgctgctttgctcttgtgcagagaaacacagttcataacaacagcaggaaaaagtggatcagtactgactcaggaatgtcagagctgctcaatttatcagatgagggcattaaaataattctgtgttccaaaagaggaaaaggtgtgtgaggtagagcaatgacgcatgcaaatataatgtacacatgcctggaagtgttacagagtttataatttctgaggaagaagaacgtgctggaaggatttggtagatgaggcaccagagaaaaatcagaggagttcaaactattccaaatgaatcaaatttaaaaacccaactgaaacagaagacataatgccacaggaactatgaggccattcagtctaacccagtaggagcccctagggagagaaggcagggagtaaatgccatctgaagacagaatggctagaggttttcaaaaatttgctcaaaatcataagttcatggacccaaaatgtttaacaaataccaaagaaaactacatctaattttcataccacaaattacttctaaatggtacttacaattaaatctgccataggaggaaaaagacgttacagaaataggaagagtaatgaccagttttttttgtaagaaatactggggaataataaaactgtcaaataagtattctttttttggtttctcgagacagggtttctctatgtaacagctctggcagtcctggaactaactctgtagaccaggctaactaacctcaaattcacagagatcctcctgcctctgcctcctcagtactgagattaaaggtatgtaacaccactgcctggtatcaaacaaggattttgtacccagataaaatagcttttcaaaacaaagatgattgacaaagaaaaacccaaaagagtggttgtgacacttacagagccacaagaaatgagcaagggaatccttggagcataagggaacaggtacaagatgggactctgcatctacccaaaggaaccaagagagaaaataaaataaaaccatgtttggagtaaagtcattagcaagtgaatgaagaccactgccctagtttgctctgttgccatgacaaaacactgaccaaaagcagcctgggtagggaacgtgtctgtttgttacagtccatcgtggaagggaaaccaaggcaggaaataaagcagagaccacagaggaaccctgattagttgcttgcttccaaccttctgatgcctttcttacacagcccaaaacctcctgcctagggatggcaccacccacagttgtgtggcacctcctacatcaattataagagggaaaaatgtccagtagatatggccatgggctaacctgatggaagcaactcctcagttgaggttccctccttctgactctgtcaagccgacaaccaagaccagctagccttcacaacctgtgacatgtgagagcaaaatttaatggtgacgcagcacacaagcctggggctctttgcagagtgcttacactgcatatgtgggttacgtaggtgagaggtatgtgtccaagtgataggcaatcaatatgtggaaatgaaacctgccttctgcatttgttgaagtattcatcacaatagccaatcaacctaagtctcccccatcgtaaatagaggcagaaaaggcagtgcgtgtacagagtggagtacggttctgccctacagaaggaaggaaagcctgtccgtgccaaatgagaaaattaaactgaagcgtctcagggctggtgagagggcttggtgagtaaggccacttgctgccaaacctgatggcctgagtcccctctccagagcccactcggtagaagagtactgactcctaactggttgtcctctgacctccacgtgcattctgtggcacatacagacccacagagactacaaatatgcagataaactgtggtaaaactataaaaggcaagcatctcactatccagaagccaccgtggagccatttttctgtggaaggctgtgtatatctgtatcgagtcggaaggtggaggactgatcagacaaaaggcatggccatgaggtagcaatagaataacatgcagaaagtattacagtttggagtgctcctgaaagccttccggggaatgtccagggcccgccaccagagggagaaagtgcaaggagattgcctgcagagaatgggagaaggggcttcagtggagaggatggactacagcaccaaaggacagcatccacatggggtcttcggaaccccgggatttgtcttatctctggctagaagaagttgggtagttttacagattatgaaagcagccagactctaaatatgaaatatgtacctatagatgcgcttgtctgaacagcgctgaaagcaattagatacatactgagtttttgtttgcctccagcaaccctaaactaagagtcgaaggctgtggcacagaagtaaacaacatatggggctaaacagtactttgtaatatgaaaacaaggccagcaagatggctcagtggaaaaagcactcactggcaaacccgatgacgtgagttcaatcccagggagccatgtggcgggagaacaaccccacaagttgtcctgtgacccccacctgcacttctgtgtaacttcacatctgtttcctgtcctgcttttgatcctactgacttgggagttttagacccccgaaaactcaagtatccggggtcccaggccacattcgcagtcaccccaatcaccaggcggatttgagagcttgctgcaaactgcacaaggctttattgtaatttaacgagctaaccccatgttagctcgggtctttcacccacccgccatggcagatggctcgcaaaagacggctcctaggggctcacgaaagatcttatagggtagcataaggggagtgtctaggggtacgcacaggctcatgattggagggcttgccctgtgttgattggtcaactggttgttatggcccataggccctcccagggtggttgctatgctctctacatcattgctgtgcgcttgtccgtaaagcacacccagagccataaagcatagcgccaccagctaacttctgattggctccttgtcacgagacaggcatctgactttctagtgtctgggacaaggtcatagaagcacgtgtttggctgttatggctgccaaaagggaagctggttccttcaggagaaatgctgacaaaactcagggggacaccaccagagatttttgggtgacacttctatatcacctgtgtcaatagtgtctgttcttcctgaagaggccataccctccttcccccttttcctgcacaatcttgtaacccttctccctattaaatgatgttagacccccgaaaactcaagtatccggggtctcaggccaggttcgcggtcaccccaatcaccaggcggattcgagagcttgctgcaaactgcacgaggctttattgtaatttaacgagctaaccccatgttagctcgggtctttcaaccacccaccatggcggacagctagagaagacggctccttgggtctcccaaaagatcttatagggcagcgtaaggggagtgtctaggggtacgcacaggcttacgattggtgtgcctccaggcttggagggcttgccctgtgttgattggtcaactggttgttatggctcataggccctcccagggtggttgctatgctctctacgtcattgctgtgcgcttgtccgtaaagcacacccagagccataaagcatagcaccaccagctaacttctgattggttccttgtcacaagacaggcatctgactttctggtttctaggacaaggtcatagaagcacatgttcaaccattatggctgccaaaagggaagccggttccttcattcccccattttcttttctggaaatttcaatcatggaattgctgtctctctagcatccccatcagggagtgatagatattggcatccccatgtaagggagttccttttgacttagcattttaaccagggaaaatggacgccgaaattcttttctaaactgctttctgctgactttgggacgaagttagggaccccagaaggttgaaatgctagtcaaaagcaaaaagggatttaggcaatggggaatttatcaggggcttctgggtagcagacactgttgcagagacagggggtgtccatatcagctgaactggttcacatccacagcaagtccagggctcgcagtcttagaacagtctgtagtcagcaactgatattcagatgtctgccagaagcagaaacctgtttaagacatgtttaaactaggaacagaggttaaagcttatttactgaagcccacagtgtagaaaaagcagatatctgtttaaacagcaagaacatatttataactttgagtcctagcaaaaactgcagatttgggatataagcatgtacatttttcttctgtccagagagccaggtatggattggacagaggtgcctttggcctgatgaaaagccctttaagtttgtacttagatgacaaccaaaataaacttaaaaaccttgaactcgtgcctgaacagtagatagttactattttatcagctaacatactgactagtctatagtggatctgactgactgatgctgtcaagctgacaaccagtaatatttcagagatctgagaagggtatattttgtccgaatctactaaaaagtgacagaagccagtctatatacagttagccaaacccaagtttctccattaccgctggaggcagctgtctcaaagaacaacaatcttcgccaggcctatactgtgagagtttttttctctctgtggaagagggacatggaaaagactgaccttgttttgtctaggcaaaggggtgcaatcaattttccagtgtccagcagctttgtccacagtctcggccaggttctggcaggcggcaggtatcacatctgagcatctcgctcactggtccaggtgcaggaactgaggtgcctcgtaatcttctttggagactttgggtcactgtccggatctggcagtctgtctgacattataaactttaaagataacaatttaaatgccatattctgaagatctctgaagcattagaagtctgttttagttgctttccttaagcacacaagaagcacacaggtggctaggtaaggtcttatttctgtaaatgatttttagtctgactgtaactggttttaacttagtaaaatgtttgaaacagcacagctgaacttaaaactgcatagagctaccttatattccttaaacagtagcttaacttctttctgaggcagggtttttctgtgactttggagcctgtcctggaattcgatctgccggaccaggcaggccttgaactcataaagatccatctgcctcttactcccgaatgctgggattaaaggcgtgtgccacctacatcctgagcttaaaggtgtgtgtcaccaacattctaaacttaacttctgaaaacacaaactgtaccagattagcatcttttataaaacaagaactttacattgtcaggctttgcttagaaataattctaaattgaagctctttaagtacaaacattaataaaaacaaacatttgaaaactggttttaaaaagaaatttaaattcccttaaggtctttctgtaatatatagaagcattaacattttaaatcttaactgaaaaacttgtttctaagatggtacctctaatttccatggggtcacctttagtcaagatggcggcttaagtatttttttttaactttagcaaaatggcgaccagtcaagtcatgtgaccagttggccatgtgctggctaaaccaggaaacagaacattttaaaacaaatatatataaattacttgagaaataaacaggacttttttttaaaaacaaaatcagcttaatatgattaaaattttaacttatattattatttttaaaatttactgtttgtagacatgagaaaccatagcacagtttatattttttttttaacttgtaacaaccttttctctgaccttcgacaactttcctctgaccttttacaacttacttatccctctataactttttgtaacaatctttttctctgacctctaacttttctctgaccttttacaacttgctttaaccctctataacttttaccacttgctgtaactctctataaccttttagtttatttctctgactttcttagacattcttagacaattttttttctctttattacttaagtcttttatatttttttttttatttcttagttaacataaaaattttgtcaaagtcccttttacaattcttaataactttaaggcccccctttttttttttttttgaatatccggatcaggacagatggttcatctgcctgagctagctccatgtgctcaaggcagagagacctggggtaggggtgctgctggtaaccccagacccttggccaatccaggggtgggaaagactcctgcggcccccccctgcataccatgtgtgtggagcacagaaagatgagtagcagatggtggccttgtagccatgttccctcagagcagggaaacacccgagacagccgctggggcagaaacagccctactgggcatgcctcatagaccctcaggtgggaatagaaagggggtgttgtggtggatcctgaatagacaggaaagaatagacgccaacccaatccgcccgcgctgcttataaggcaatggcgcgggaagccaggcggcagaacctggcggctaactgaggcgggtccaagtgtccttggcccgcgtccgtacctcttgggtcctgggtgtcctcagagtggcagtctgtcctccggcgcatctgccgataacagttgaggtggcgccatgtgctcagagaagaaaagacccctgaccccctgacccatgcatgccacgtgcatgggcaatgtgggacagaaagagatgcttaagaaacacataacacaaatgacagcacattagacagcacaaacattagacaggacaaaccgcggcaaagaaatggtgccccaaaccaaaattacaaccaaaccttggactttcatccagggtggaaccaaggttctcgcaagtctgcttaccctatggtttaattacaaattttgcgcagatcaaatacaaattacaaattctgcgcagatcaaatcaagcaaccctcggactttcatccagggcaggacttcagggtcttcctcagaagtccgaattacaaatacaaattctgcgcagatcaaatacaaatcatggcaccaaacaaaacagcaagagacaaaacaagaaacatagaacactgaacatatataaattgcgagctcgaatcatcttacctccaagatcgaatccactcaggtgaagggtggtcgcaaatcccggacgagcccccaaaatgttagacccccgaaaactcaagtatccggggtctcaggccaggttcgcggtcaccccaatcaccaggcggattcgagagcttgctgcaaactgcacgaggctttattgtaatttaacgagctaaccccatgttagctcgggtctttcaaccacccaccatggcggacagctagagaagacggctccttgggtctcccaaaagatcttatagggcagcgtaaggggagtgtctaggggtacgcacaggcttacgattggtgtgcctccaggcttggagggcttgccctgtgttgattggtcaactggttgttatggctcataggccctcccagggtggttgctatgctctctacgtcattgctgtgcgcttgtccgtaaagcacacccagagccataaagcatagcaccaccagctaacttctgattggttccttgtcacaagacaggcatctgactttctggtttctaggacaaggtcatagaagcacatgttcaaccattatggctgccaaaagggaagccggttccttcaatgatagtctcactaaataacaatatttgaagggtgatgcacagccttaactggagcagaggcaggcagatccctgtgagttcgaggccagccatggcagcataatgagaccctgccaccaccacccctcaaaagagagacagagaatgaaagaagttgggggctagagaaatggcttagtcgttcagagcactggttgctcttctaggggacccaggttcctttaccagctcacaaccacctgtaattccagttccagggtgtctgacatcctcttctgtcctccaaaggcaacaggcacacatgcagtacacctacatgcatgcagacttgctgggacccagcccccacggggtctctaagagttgttttccagcataaccacaggtacctcctgttttcctgacctcaccccactggcatcaatatcctgttgtgaaccctttcacctggggtttttgtaagtttgtacataaggctgctccacaataaaggtgagggacattctctcagaaaaggaccaggagtcttgtcattcatcaaatctccaggcttttgcccgatactcggacttagtggtggccaaggacagcctatgcaatcatacatacacataatttctaaaaatttaacttgatattaatcataaaatgcccttttttgtcctcacccacatcagctctgttccactgtcatgtggcaattgcaatgtgtgagacagtaagacaacacggcttcctgggaatggtacaggccaaagacaagcaggcctggaaaacaactatcccagccaaacctaagtgcgagcagccctctgttgtcagcctcctggggcagaggaagagcaagaccacgagcaggagactgggctggcccaggtggccacacacataagctaaacctgggcactttctatgctagcctctcccgtattctcccacacaagcagtttctcagaaatgtgtgtgctttatctgaactgtgctgcttacagaggtggattgatggtttctctttgcactaaactctcagagaacaggcacagatttgttgataactgggcaggcttctctacctggagaaaactggcaacttggcacatgtcactctagtacagctattcatgctcacctgccagctgcgccattggcgagactcacccagaacccccagactatagtgcacattgcaaagaacatgtagtcctcccagcccttccaaagtggggtccagagtcggtagatcagaacatcagaaacaggggttcccctcccctaactctgtggactgaagagcaatggttggctgctgtgaggcactgtccgctcgggccctctagggatacactaggagcatccagagcaccttaagaggcgaaccatagatctatcctttctcaggaaagaccaaccatcctttcatttgagaccagacaaataaacaggacatcaaaaagatgctatgtctggtggtaaaggcctataattccagctattctagagactggggcagaaggattgcaagtttgtaaagtttaagaccagcctgagctacactgtaagtccttgtctcaaaaacaagaagtggggcaggggtggagagatggctcagcggttaagagcactggctgttcttccagaggtcctgagttcaattcccagcaatcacatggtggctcacaaccaccttgaatgagatctggtgccctctgctggcctgcaggcagaagactgtatagactgtatacataataaataaataaaatctttaaaaaaaaaaaaagtgggggcaggtggggggaggtagagtataaggtagcaagtgtttccccaatatcaaagaaagactgtcactataaacaaggactgtcctctggctgtccaagcagctctgctacttcatgaccctgtccatgttgttattccaaaaaataaatggcctcaagataggaacagaatagacatttccttaaagactacatcatggctttatgtgtgtgactgttttgcgtctctctctctctctctctctctctctctctctctctctctctctctctgtgtgtgtgtgtgtgtgtgtgtgtgtgtgtgtgtgtgtgtgtattcctggtgccagaagagactgtcagatgtcagatcccctggaactggagttacatatggtttgggagctgccatgcaggtgctaggcattgaaactgggtcccctgcaagagcagccagtgcccttcaccactgagccatctccctggccccattttttctctcctcatctgtttgcagagtctaggactaatctatgtaaatttgcttcagctgttaagaacaaaatgggatctaaaacttgagctgcagtgggtgtctctttaaccacttcttttaaaggggtaatcctttgacaaaggattacactgggaagaaatgtatctagactaaggatagattaggttctctgttctcaaggtatttggacagagacctgagacactgtttcatccaaaacctttgtgtctcagagaaagtggattcaaagatgatgtaaacagatggggccaaagtcttggtcaacatggtcttagccctggctctggaaccccaatttcctatgctgctgcctctttctagtatcttcaaccaccacccaacagatgctgtgaccgcaatttcagaaacatttgttccatcaaacctcatgcaaataacaattcatgagtcactccaagaatctcgtttgagtgaagatcctgctggggcgctgaatagagacagtcccagtctgaggtgggaagaaagacaaggactattctagcaacagaaggaaaaggagccagtcaccagcagagaagcccaattaacaactgttgaaggcagctctccttcccagcgggcaacctgctttgctaggaagcttatcagaaatcccatttgccaggaagacatgctgtcaacttcttgagcaactctagtcacccctggctcacatcatcccatttcaattccatccatggcttctcgggagccactttataatctcacttatcaaaagacacaaaaggagagaggcagccttggcaatcttttaaaatgtaacctgagagccaccaaaatggcatatatgcctaaaaccaggacaagttttccccactcaggaacaggtacccacactttggtaagtcttcctcccaagtgcctctctttctcctaaccctgaagcttaaagtctagattaaaatgtctttaaattctaaatctgcttctgattggtccaagaattcttgtctgcatcaaagccacgaatcccagtttggcttgaatcaaggaccttaaaatattaagggagctcctcgggctactgagggtgacagtgtggggctgtgcctctaccacacactgctggcaggcccacgcacagaagtatgcaccccttcttgtgaccgttatttattatcactggtgtgtgtgtgtgtgtgtgtgtgtgtgtgtgtgtgtgtgtgtgtgtgtgtgttgtgcaaatggatgcatacaggccgtggcagggatgggaagtcagatcttcccaccccgttccattatttctggggactggactcgggtcatccagctttctcagtgcctctactggtggagccgcctctccagctgccacttctgacagtctgtgagtacagctgacatcattatttcctgttattactggtgagacatcgaagtcagagaaggccctgtctgggatgcagcctgagtcctgctacccccagcagctggaactccatggatcggccttctcaacaaacaccccaaggcctggaaaggccacttggtcttggagctcacacttcccccaaatagcatatttctcctcgttatgtcctaaatttgtggcttaagtccatcctatctttgtgtgggttttgtgctttctcaattcacttttgtgatttaaatatcttttcatttggataccaaggcactttaagccattccatggatcgcttaaatttaatgttttcataaattctttgaaacttggaagtctacatttttttccgtattgtgtgagtccaggagggcagaaaaacttgagtatttttaaaaaggcatccaaaaagacttgtcttttatacctatatatatgagacggcatttcactgtgtaacctcagctttccaggaaaagcttccctgtataaatccacctctctctgcttccccagtgctgggactaaaagcatgtgccaccacacctgggataaatatattgttttccttccctaaaacacttgttccaggcagtctttatggcggatgcctttaatcccagcactgggggagacaggcaaatctctgaattcaaggtcagcctgaagttcaaagggagttccaggacagccagtagtactctgatacacagagaaaccttctctgaaggaaaaaccaaaccacacaaaaccattgtcatgtctctaaaatgttggaaggtttgagttgggaaaaaagtctacttcactccctcattcctgtaaccgttgatatctagctgcccttcccataacgctgcaaagtgagaaccccctgctgtgtttggctgatgtggtacagatgccattgccaagaatgtgctatctaaacgcccttcggttttcagcgatggaactccaccctcaacttagttgtcagcttttgtggaatgttatgataagatgtagtaatactggtgttcagacatgaaaatggtggggaagcaaaaataaacttaaaacggtattttaagtttaaaaaatctgcatcccttctttcatttttttttgggggggtggcttttcgagacagggtttccctgtgtgctttggaactggaactctgtctctagaccaggctggcctcaaactcacagagatccgcctgcctctgcctcgggagtgctggattaaaggcgtgtgccaccaccacccggcaaaaaaaaaaaaaaaaaaactgcatttcttatatatatgtttgaaacacgtcatcatgtagcccacgctgaactcaaactcactgtgtagtcgaagatgactttgatcctcctgcctccactccctaaattctgagaccaccatgctggggcgcgtgtggacctggggatgaaacctgggaattcgtgcattctaagcaagtattctccccagccctaaatatcgtatttttctgacgatttcagcacatcctcgccagcactaggtaatcttcatgatcaacaccatctctgccaattgtttgttttgttttatagctctggctgtcctggaactcactctgtagatcaggctgttgttgaactcagagatcctccagtctgcctcccaagtgctgagattaaaggcgtgcaccatcactgcccaaccaactttgaatgcaggaaaattaagacctgttattttttattacttatttatttatttatttatttatttatttgtttgtttaggtaggtaggtaggtaggtaggtaggtaggtaggtaggtaggtaggtttttcgagacagggtttctctgtattgctttggagcctatcctggaactctgtctctagaccaggccggccttcaactcacagatatcctcctgcctctgcctcccagtgctgggattaaaggcgtgtgccaccaccgcccgcccagcaaggcctgctatttaagagtcggtttccagtactgtcgaacttgcctgccctgagctccgtgtctgcaacgtggttctggggcaaggtccagacctggtctggctaggcttaaccctcgggtctaagcggccacaatcccgggccccaccgcgagggtgcgctgcgacctcaggtccccctcgcgcaccaagctcggggcggtccgcgggggccggagcggggcggggcggggcaccgagcaaaggttggcttcttagcccgggactttctccgcagctccccggcatcatgacggtgggcgccaggctccgaagcaaagcggcgagcagcttcgcgcgccggggacacctggggcgatcgcgcggcgcgggtgacgaggagacagaagccatcgtagagcacctggaggttgaggatgaggacccggcgacccaggagggtgagcacgaggagagcgggcggcgcgcggggaccccgagcgcgcgcagagtgcacctggctgcgctgcccgagcgctacgagcccctggaggagcctgcgccaggtgacaagcccaagaagagataccggcgaaaactgaagaagtacggcaaggtaggtccccacggcccggcccgccccgatccaggcagaacctggagttgttttgggtggagttgtggccgcgccgccgccaggacagtcacttggagggtggcgttgagcgtgcagacttgggcgagcacaagaaccctgtgcctggttggtgggaagggagtgttgaagccgtggtgaggttaagtgactctgggacggtgacccaactgggaagttgtagcccaggtgcatccatcccccatcctctccccgaacctcccggccacacgagagcgttaggtgattgtgccgtggacgctcgggggcctgccaactcagccagcacacacccagcacctgtggaatctccctctctctaacagtgacccccgcactttgaacttcagatgctctgcctgccttttgcttttctgtgggaggaggtgggagagtgaggggaaggatggatggggcacggaatgtttccaggatgaaaggctctggctcccaggtgcccctgcctggaagtagaattgctctcttggcctggacaggagcgtgtttgtgggggtggggggcgggcgggcgagggtgggggaatcacaaaagtcattgattgtgccccggtcaaagttctctggtctgtcctggttttattgtgtagtcttaagtggccttcagtggatgacctttatcatacctgaggcattcagtccctcgcccagagtttagtttgtcattctgctgaatgacatggtcgtgctctctcacaagcaggtgatgataaaatacttgaagtaaagtgggactttgcgggaaaccatccgaaagtgaatttgatgacacgggttcctctgttggaggctggcatttggagaggtttggggtggccattctgctcctggcattgtgtatacactagaggtgcaagcatgaatcctaacagccctaacagcgggtggggagagtccaaggcacagcactgctcctcactgcatagcagagaacttagtgactgctcatgcccgtgaggctaatataatcagggaccctgggtagaagataaggcaagacaaggaaacccacatctgcaagcccaggaactctggagggcggggcaggatgatggaaaatgtaagggcagcctgggctagatgacaagatcctatcaacaaagagctcagccaggctaacacagaggtaacagacaacactgattagggtggctatgctaaaacagacaatgtccaagcagaaagcaatgatgttagtggggatgtggagacatttggggccttgtacactggtgctgggatacgtaaactgttgaaaccgctgtggaaagccacttggaggcacctcaccaagttgaacacaaaactactccatggtcacaaaactactcatgggtcctactccaagggaatgatgaaagacctgaatgtcaggctgggggtctttgtagctcaggtggtcaagtgctggcctagcattcacagaagacccagttagatctctggctctctgtgaactaggcgtggtggtacacacctataatcccagcacttggggagtggagtcagcagattggagcttagggtctggctttgtgggaggggtgctcacttccaacctgacaatccaccttcaatccccagaacctggcaaaactcccacaagctgtcgcctggccgcgttcacaccgtagctagcacagattgcatgtacactaaatacatgtaataaacattttgggccgggcgttggtggtgagcgcctttaatcccggcacgtgggaggcagaggcagacggatctctgtgaattcgaggccagcaaatatttttttctttgatttttttcatatgtgtgggtattttgccttcataaatgtttgtaaaacaattttacacataatgttcataggtgtctcttttaccaatggacaaaaagtgaaaaaaatccaaatatatgtgagtagatgaacaaaatgtggactggacgcctatggactattatttaatatctataagaaggactaatattagctgtcacatggctcaacaagatattaagcgaagaaagtcatggttccctttatatgaaatgtccagataggcaagtccagacagaatgtgatggtgattttaggaactggacggaggcatagagaggccaaatttatatgtgatttccttctgggatgagaatgttttggaagtagacagaactggtagttacaccttataaaggcattcaatgcctctaacctctctccactttataaaatcatttattttgtatgtgaagattgggggtttttgttttgttttttgtttttgtttgtttttttttgactacatgtatgtcttgcctcatgtccacagaggtgagacaggacctggaattacagatggttgtgagccaccatgtgggtgctgggaactaaaactgaacccaggtcctttacaacagccagtgctgttaactaactattgagccacctctactttttcactttaaactgtttggttttatgttacatgaatttgtgtgtgtggggggggattttgacatgaaaaggggggttgtttgttcgtttgtttaccaaaatggagagaaaagcgatgagggaaagctctggaatgttagacacaagctcagtagccccaagatgtccagacaagattatagccccaggtaatcacaaggggtcacaagagccatcccgccttccactttctcaggccaggtgagaaggtaccaggctccaacaaaatggaagaccgaggagacctccttttctgcaaagctacaggaacagccgaggctcttgcagaagatgggggtgggcatctgtactcacctcggttgccaggagaggctttcttttagaaatgaatggctccaattattggttattatggaatgtgttttctttaagttcctattcctgtgaacttcttagatccttcacccaagccccttcctgcttctatttaaggaaaattgttggcctttgtgcaacatgaaagagcaggctcactcccccgctctaaccccccccacacacacacacacacctccaccagcatggtcctacgcaggagccaaccctcacactgctggtccagccttctggaagcctttgtgcctgggcctcttgtagagatcaatgttccagctgattttaaagaaataattgcattcctgtggtgcacatattactgttaaaatactgtctgctgggcactggaggaaggaaggaacctgagttggcggtgttccgtcagaaggctggatgtctgctaccttctttatgttccatgcctgagtcctcccagcaaccctgggaacctggtattgaagacaatgaagctgcagagtcagacagccgaagagctgggagggagcccggcctggccccttcctctgcagatcgtgggctagaaggatggaacatgcctcagactcagctgaaaataataggccgcccttgcaggcacccttgaggcatggagagaagttcaggaagaaaaagaattaagttatgttaattgggaagctaggagagggttggagggtaaaacacagggtgtgggataagtcaggtatggtgttgcaggcttgcatcccagccctgtggaaactgagatgggaatcaggggtgcaggaccaacctgggctactctgccctcccccaccaaaaaaaaaaaaaaaaaaggtgagaattggtcatggagctcactggtagagcatgtttagcatgtgccaagacctaggtgtgaacacactacaaaaagggggaggaggagaaatggtctcatgttaaagtaggggtccagaaccagtctaccagatgtgagagccgcatggccatccattggccgtatgaccttaggcttggcttcctctcaaccgcctgtttcttggtctaaaccatctgctaataatgagggctgggctgggctgggcttggggggagtgcctatcaagtaggcatgagagagcccaggaaaaagcttggcacagtggcccacacttacaatcccaactctggggaggtggagacaggtggctagccagtgtagacactgagtattgaccccgacacacaccatcctgacacacataccaggtcatatcaagttgatggtttagtgcctgtggaagttctatatgccagggcgcctggctgaggctctggagcagctacctttgaggagtgggttctcttcattcagattctggagctgaccatccacctcaggatggtgccaggcctgagggcagctctacagaggatttgacctttggatcagacagtgacatttgtggctggatgattttctctgggggttggctgtaatgtgcgtgctacagctctggaactcagaaggaaatcccagacagtcctcctgagctgagctaaagtcatcaggccatcttcctcccttcaaagccagtagtgcaccctgctctctcctcccccgcctgacctccccctccccccactgccatccccctgtcctgctgcattgagacactcacctgggtagagccactctttgcctggtatgcggaggctccagggagcctctcaactgactcatactggtaaagttcctcttgccatttcaagcactagagtcttgagttctgggaatctgggggctagcctggcaccctctcccacaccttcccatctcagcatccctaacagagatttgttttatcccagatcctttcccttgaatagcacccgtgtggccatcaatagcttctttggtctcttttctctgtgcttctcaaagttgtgttttgacagagttccatgttaatgagctatctcagcagactttatccccaaattgtaaagatgaagtgataagtagtttgtttttaaaaaccaaacagtaaccagctatggggaagggaatgcacaaatccactaacggttgggttgcaggtggcagtgtgattctgatgtcattgttcataaaggaccagagctgtgattgctccaggggtgcatgactgctgtttcaaacatggaaaattaattctcccattgactcttttcaatacatttatagaattcctccctccctccctctctctgtctctgtctctgtctctgtctctgtctctgtctctgtctctgtctctctctctctctctctctctctctctctcacacacacacacaaatacgtttccttgagaaatagataaagtagtgtcctgaagacacaaatgtaccagtttctcccaaaacttgtcatgacctagtgagggaccgagtgagtctggctttctctgcaggctggggatacctgaactggtacccactgcagtgtggggccctgacatccataccatggacaactcaaggcaggattcataggcaactccatattctctttaaaaactttcctagcaaggcagtgtggctcacacctataatcccagcaccgagagagatgaggcaggaggatcaacatgagctgaaggccagcctgggttacatggtatgtcccatgccagctcagctactgaatgagatcctttctcaagaagagagagaaataaaactttgctgagaaataagaagtgtctcaggctgatatattgccaccacaaacctatgttactctgtaacagaagtccctgttcttttgaaagctgacactgggcactaaccctgcctgcaacacgtgctgggcgctgttcctagtgctccctccctgtgaatagacgcctcagtcctctttaccacacaaaaaggccactacatagttccattttacagacaaggaaactgaggccaagggaatttaaggaaaggttgggattggaactcacttctggctgtgagcacaggtcacttactaactaccttcattagagagaggagtcacatggggtgaaagcttccagctctgctgtgagatttcttgggggagggttcagctctaccccttaccagctgtgtggtctcaaaggcatgtcacttccctgtgatttcttcttgatgatcccttaatcaaaggccattgaggacataccagtcacccaggttaggccaacttatttcgtgcaatgagagacaatgccagaggaattgtggggtttcagaagatggacgctccaagctgagagttgaatgtgtgaatctgagctagagttgccagcttctgagtccaaggggttctaggcggagcacagaggagaacctagcattgaagaatgaagacctcaaaggttcaaactctgcaaggagacagaatcaatagagcgtgtttagaaggagcaccctgtggaaaagaggagaaccaatgctcaggcgagggaacagacagaactgtccatggaccacacaacatggaggtggtaggcacccttgagcaggcaggcccatggttacactggcagggtgggagaagccaggagccagagcactgagcttgggggcaataggggatgatgaacaggctccccaaggacatgtgattaaggcaatggggacaagggctccacacactatggctggggtaggcagagggaaaggttgggctgtatctgaaagagaggtcaaccgacctgggcaggtgggttggcttctccactgggtgtcatggtgagtcttgagagtgggacgggatcgtcagcagaaccaggctgtgtattttgtagccagaaaaatcaaagggctgaaagccaagggggtgtgagagaaagttcttctagttagttacatggatgtccaagtcaccaagaacgacaaaagaatctggaggtgggaagaggaacaccgtgtagtaagtagatcttaaccattagtgtctctaagttgtgatggacctggcattcctgtcccctgtcccgacacccaccttcaccaaggaggaagaggaggaaagcagcatccaaaaagcattacctcgtccttaccctcaacagtgtgagactgttttggagtcataaagggcttgtgcacttgcagcccttggagagtggagaaaacttcctgatgacaaatatgagggtcagaccagagcaggcactaggcacataggaaaggaccagctgggctgtctaacaagatgcctgaaggaaaatttggccccgcctgtgatggcgctgacactttcaactgagaaagtgggtctcagtttaaaacaacaaaggcattttagttctggagctggccgcctccatgctgtttctaagaaggctgtgagttatctggaagtgtgctgtgcttgcaagcactttgcaagacctgttgtgagaaggggaggggacccaggtgggcactacagatgtgaaggctccgggcctccatagtgtgccttggatccatgagggcgaacggttctctgtgcgttatcatggtgagtcatggaaggatcaacaggttgcctcacctaacttttacttttctcttcctaaaatagaatttcgggaaggccatcagcaaaggatgccggtacattgtcattggcctgcagggatttgctgcagcctactccgccccatttggagtagccaccagcgtggtgtccttcgtgcgctaatgggagctgcaggcaggcatcacgagaatgcttctgccccaggacagtgtgaatccaccagcacttgagactcgaactcaggaactctgaagaggaaccctgcttcatgctccattgttgaactggttgagtgttgggcaggaaccattcccgctcatctgccgggccactcgtttatgttggacatggctggatctaggggtcagtcctgtggagaatttggccaaggtcaagttagggttagggttagcttgcttcctgtaccagctagagccttctggggtacaggcagacagactcatggcaggtcgggggtctgagccatgtgggtagtgggtgagttttgaggggggggttgcagacctctaatggaatagttgctaggttctggaaaggtccctggccttggccttccttgatcctctcattaaggacaatgagggaggtgatctgacatctttctctctcctcatctctttgctttactgagctgtcatcgggagtttaattacagggttgggaagaaaaaaggaaggaaaccgtctttgaagaccacgatgctttgaatgaaatccatgttcacagctgtgtgaagactgttgaaagtagatcagaatgtgtcattttcataagtatttcataacaacgcagctggcaaagagggggggagggagggcaagttcagaagctagcttggaggctgcaacaggtgctttcagagtctgaacctggtccagcaattgtgtttggagctgtcaggagccctgcagatgtggttgcccagcagttcactgctgacaggtgcctaactcccccaggggagggagtgaggggagagagggagagagagagagagagacagagacagagacagagacagagacagagagaaggagaggggaaagagaagagacagaattggcaagcatatttagaggagcaactgtaagagatagacatgaagaagaaaaaagccaagaacgacattggagaagcaatggaagttggggagtcagggatgcaagcttgtgacaggagttccttgagagggctgggctggttgtatgtaggaccagaggaacctggggaaccagaggcaccatggtggttgagttaacacttcttaggccagcatctcacttggattcaaagattaatgtagacatgagtcccaggcttgacactccaccaaggatggttcatagactaccattgagcactgggagaatgaaagaagaagcccttttaaggctaggatatctgggaaactgtactggtttgtttcacaactgttttcaaagttgttcatagaggttcctctccccatgacccttggccaaccccacagcaggccaggattccaaccttgattcttgggatcactctgcaggatcagcatcagcttgttggtctgggagacttctgggggcacacaacgaaagccaagatgctcatacctcacctgttggggctgaccatcaggcactggtgggtgggtaggaaggtggacagatggacagaagaggagcaggtggaggagacagtagctgttgcacacttagattcaaactctctggaggctcctggtgaagttgaccagtccctggaactgggaaataagtggttcttgctttatccctagtatctaaaagctggttaatgcaggctcacacatgtgacagcatgatgcttgcctggtagtcttaggatagaaaatggaaaggtaaatagaaaatattaatgcagttggctggaaagaatcaggaatgtgaagcttgcaagatgtctcccctgccacctcctgatgtcgcagagccctccaagaagcccacggcattctgctagggaggcagaagtgtgacccagggaagggatgaacagtcaagggcacttccttcccctcttccccggagtctcttcctccccacctcccaaattggaaaatcagcaaagccaagcacatctggccctgtgcctctctaagtctggctaagaattaactcagaaacggccaaagtcaaaagcttgcaggggctgtcctggaacttggccagcctccctggaaggtggatttcagccccaggagcagcctgtgagatcacatccccatgtggggctcttggttcatgttgcagaccattccttgttgcttttctctatgttctcttgtgttcagccgcaaggtccacaccctgctgcaactgaatttaagagcttagctttcctattactgactgcaaaaccttgtgggttttttttttttctgtatccctctcttgccttgtggtgtaaataaaagtctcagattgtctggttgtcatgtgtcaagggctgtgccttcccttgctctgtctccccaggaaggtggctgaggctccagcaggacctgggagatagtgttggatagtggtccctgggcccctacacacaggcagtgttaaaggcttcattctctggaatccctcaggacaggttctggggaggggaagccagagccccaccatctgctacaaatgaaaaatttccagaacctttgacttctgtttggagccaggaggctgcattctgcaccagcaagaagcctctgatctctgccttggttgggaaatgcctctgctaatggggctccagggagggaggctgggccagcagagcaggccctgagtgtcagtccatgctggtatgttggcacacaggcctgatcactgaattctcagagaagcaatgatacagattaagcaaataattggccagtagtcctgggtagccagcaggttcatggtaataagtccctacctgttgggaatggtatagacctatgacagagttctttcttaccatgaaacttgtttcatctccagcatacattatcccagcactgaagagaggaggtgatggagtgaatcttctgtcaccttggaataccaccccccccatacacacacacacaacacatacaccaagctgtttctctgctcagcacctgtgtctggtcagagaagtaccaaatgacatctgtgaccaggaagcagtacttgaactcagaccttggtggctttcagggatcgctggccatcaaaccatgttttaatgttcattagaccagtggttctcaaccttcctaacgctgtcattccccaaccattgaattatttctgttgctacttcataactgtaatttcgttactgttatgaatagtaatgtaaatatctgttttccgatggtcttatgtgacccctgtgaaagggtcatttgactcccccagaggggtcgtgacccacaggttgagaatgacgccattaggcagtcccagttcagagtttgtattccgagtatcgttcctggttctgcctctgcagaacagcaaaggaatgaagaggactcacagtgtcggaagctctcagagcttccgggtagatttaattcgtgataaaatgtagacacaggtccgatccaaggcatgggatgtaggcagaacacccttgatgtccctgcaaaggctgtatttcaggggcgccaggctttgcccaaaagccaaataaattaaaaaaaaaaatgtttctagctcccttaatcatctttagaaaaatgtggaggcatagatactggcctttgtttttaaatttggaagcaaagttgcttttgagccaagtgactccactgcacatcacagccaaagggaaagcagatcttaagatctcccacggggcccagtgccaaaacctggcaggaacgccagctgtgcagggctcacggggcagggcaagggaacaaaggcttgttggcaaggcctgtgccaaacctgggccccttggggggcttcgagctcagaccttcatctcgcgcacctgagggagctgagtctgcaccttgaggactgactctgctttttaaaaaggtttttctcaggtgatttccttctatccctggtgacgagtctcgaaatagatgcatccagagcaaggcagacagaaatctaaaccaggatgcggtgttgatcagtggaatgcttgcctggtgtgtgcaggccttgggttctgtccccactactgcaataagtaattaggaaataaacaggtaagtagattattaattaaataaacatcagagccaaaggactgggcggaagccgagctgaagggccacacttccttcaccggctcttcaaagcctgggtaaatagtttccacctgggacttactccattcactctaattgagataaacagcttatttttggttttggcttgctccaagagaagttcagagttgttgcaaaggcaaaatgtggtgagaatgtggggtgataacgggtgggagggagacagagggcaagagtgacaggaagcattaccagccagaccgggtggaacacagctttcaccccagcacttgggaggcagaggcaagaggatctctgcaagttcaaggccagcctggtctacacagagagaagcaggactacatagagagaccctgtctgcaaaggaagaaagaaacctctacattcaaatatgaaattgtcaaacttaatttaaaaacttaaaaacacagtgttgagattacctcactattttaagcaggaaattctctattaaagaaacgtttacaaatttatcttctttaactgcttagggtgaggagaaagtggcatatagattaataaattaattaggaactttctccataactctcatccttttaaacaaaaccaggtttgaatgtgacttgaagtattttctttaaattgagtctgcaagcctttcatggagcctatctatgggtcctatctgccatctgctgtgttggtcccagatctgggcacagcaatcagagaagagagctaagcttcctgcataacctcaagttcagaaatgaggtgcagagaccatgtgggtgtttatccttggctctcagtttcactctcaaataatcacgtgtggggttcctagatgaaaacaagggaaactcagattttatagaaggcagctccaatgctgcatccaagtgtcttgttcactttttgtttgttgttgtcattgtaacaaaatattcaagataacaagttataagattggtgttgataagccaggcgttggtggcacatacttttaatcccagcactcgggaggtagaggcaggcagatctctgtaagttcgaggccagcctgatctacagggcgagttccaggacaccctccaaagcaatacagagaaaccctgcctcaaaaaaacaaaaaagaaagaaagaaaaaaaaagaaagaagtaaagaaagattggtgttgactcctggcttcagagttctcagtccatggctatgtgagttttagtactatagcaagatagaaacacagaaggccatggcagaaaaaagccactaatctcaacagtagccaaagatctgagaaaagacacagggcatggtcaggttacaccctcccaggaccctactctccaacacctccagtaatagcatcaaactgtatccattgtggttaaacccaccaatgaagtcagtcctcatgatccgtccttccccagggtcccacctctgaacatttctgtactgggagcggtcccttctggaatgaaacatgcaaacacctgccaaggctgcagccaggccccaggcacaactgcctctcatctccatttcttctgaggctccagatgctccagagacctggtgggagagaggtttcttgtagtgttcattcctttttctgagatggagtctcacactgcaacctaggctagtctgaaactcactatggaggtcacagggacctcaaacttgtggtgagggccttgcttttgcttcctggagctgagattgaaggtgtaagtcagcataagccatccaaacaggagttttagaggtagtcccacctgctacaaattcctggtcactttacagttattcaagcagttaggatgtttccaggagaaagttgacatgctaaccagtctgtcacactctgttgtctgagagcctgcaagtgtttatttgctgatgtgccacagtcaaggcatagacaggaatctaggccaggaaagggatgtgtggccccaagttggtccatttcaattgatttcactgatgctctgtgactgactggtcattttgctccctttgttcatcccagggcccacatacccaagcgtccaggactgcaggaaagctacctgtgtaaccggatggtgctggcatcagacaacttggcttccaatcttctaggccagtgaccttgtacctacactctccaacttcctcaactttcagggcttgttttgtctcctttgcaaagaagagtaaacagtgtctacttgcaaggtttattgggaaagataaatgtgaagggtatttagaacctcgtactggcactgaagggagggctcaatagtaaaattgcctgctcaagacccagagttccattcctcactactgaaaaccaaaccaaaccaacaactctgggagctagtgagaaggctcggtgggtaagagtctggagtctgctgtataagcgtgaggaggtgagttcagatccagcacctatgtaagaagctgggcattgctgcacaggagcctgtaacccagcactggagggctgaggcagggggattgttacagcctagctccagccttggtgaaagaccctctcttaagtgaataagatggagcatgatgtaacaaagacatgggctatcctcctcaaacatccacacccgccccccccttgcatatacaagaacaacccaacctataggctacagcatctactcactgtagcgtgctccccttcagcagcctctccacgccaagttctctctccacttgcccccttctgtgggagggaaggaatggggcctcgagctcagagctcaggtgaggaagagctgggggaagaaagaaaacagaggagacaaactgcctgcctggtgcaggtttgtgatctggatgagagacctggctgactctgcttgagaagatgcaggctggaacagcagtgtgtgtgtgtgtgtgtgtgtgtgtgtgtgtgtgtgtgtgtgtgtatactccagtgtgtgtgtgtgtgtgtgtgtgtgtgtgtgtgtgtgtgtgtgtgtgtgtgtatactccagtgtgtgtgtgtttatactccagtgtgtgtgtgtgtgtgtgtgtgtatactccagtgtgtgtgtgtgtgtgtttgtgtgtgtatactcctgtgtgtgtgtgtgtgtgtgtgtgtatactccagtgtgggtgtgggtgtgggtgctggtggggcatatcagagaagcagggttaggggtcagaggagtaggaaacaggtttaaaacccccaaaacagttcccttgaggctgttggtctcagccaggcacccagatgacaaagaactttgacctaaatctcttcccatttgtccctaaccttatttctggtcacccaaatatgccttatccgtaacaaaagaggaggctgcactaaagagagcctgaggatgaatttcttaagtctttcaggctcaagagggatccagggctccctgctcataacaagcaggaacacaacctctagactaggcaacagaatagaattttaaaaatgcaaaactgaactttgtttaaccacctacagcctctttcacatttattttaaaattttattttcatgtatctttatttgatgtgcgtgtgcacacatgcccgggtgtgtacgcaccatggcacaccgtgggagtcagtttcctcctcctgcgatgtgagtcccagagaccagccttaggatgtcaaggtctgcaacaagtgcttttagctaccaagctgtctctccagccaatcgtgtgctgatttgtgagacagatcgctgctgaacgcctgacggtgccgcgctgaaatccagcagcagcaatggagtggcacgggtatggctgcatgtcctggcatcagatgtgaccactgtcgtcaccctctggggttctacatactaggtgatgatgacacttgggggctgtctcagggtttcagttgctgcaacgaaacaccatgaccaaaaagcaagttggggaggaaagggtttatttgacttctgcttccacgtcacagttcatcatcaaaggaagtcggggcaggaacctggaggcaggagctgatgtagaggccatggatggtgctgcttactgacttgctctccgtggctttctcagcctgctttcttatagaactcaggtggagctcagggatggccctgcccacaatgggctgggccctccctcagcaatcactaactgagaaaatgccctacaggcttgcccatggcccaatattaaggaggcaatacccaccacaccccccaatacggtttctctgtagccttggctgtcctagaactcacactgaagactaggctggcctctgcctgcctctgcctcccaactgctgggattaaagatgtgggctaccaccacctggcaatggagatagtctctcaattgagtttccctcctctcaaatgacttcagtttgtgtcaagttgacataaaactatgtagcccaggggcccataggaaaccatctcccaggagaaacaagcaggcctgaaccagggaaggagctgagctattgtgtccatctgctcgggtctcagcctatcacatagggagccctgcagctagctggccttcagggtaagctggacatgtctgtgaaccctcctctgggctgtccatgcctgagctgctctggtaaggatgcccaccttcaggggaggccctggaacaaggcttaaaaagcctcctcactgaacagtgtctcctgcttccttataggggcatctgggtggtcctgtcctgtacttcatagtgaccctcacatctgagtccttctctgtgtgggagattggtcaagagactcagcctctttgaatcagcttgcctaccggacaaatggggttgtgacatgtcttgacattattgatggagctcgggcacagggccctctgtatctggtgtaacagttacaagcagttacactcagtgtgaggaatgtgtacctgtgagattcaggggtcttcaggggaggcctcctatcccactaggcagagacgggagggacattccagtcactggaagtcacacatgtagaagtccaatgctgtagctggactaggtgtccacgaactggcattgagaggacaggacctttcaggttcctgtaccgaccctggcagtgagagataatttcggcctggtctgtgtgttcttctagccatctccagccttgaaaccttagagttagatgacaggaaagtgtcatccttggaggccagggagtggtggaacaatagccccccaacccgaggccctctgaggccctgggcaaaggggtcacctctggctgtcccttgtgaatgggatctttgagcaaactgtctccaaagtgaaacccctttcctacctggtctcagctcctggacacgatctgagcactttgagggaagtcagcagggggactggctgtgtgactttgactgcaccatacctctctgggcctgtacggtgtctggtagaagaaaggctgacgtttcttcttattgtgagaagaaccctgcagctctccattgctttgccagcctcctctacaaagccaagtcacacccttgtttatctgctgtctcttctagggggctacttcctgttctgcctgctcttggcttcttaagatgcgcccaaggccacagtgacaatcagccagagtggcctgctttcaactggaccccagggaggaagtaggacaatggtgatcaggtcctggcagcctgtgcccgccaaggggaggcgtctgtattgtttttctgggctgttgtttccctaactggactacatcctcaggccctgcttcatcctgaccaaggtccccaggcaggaagaccccctgaacctgcagcccctctactctcctcacactctcactactccccaccccccttcatctacctctgttgctcagctcagctggtctcacaaaccccagtgactctggccaaactgaaggccactgcctctgctcaaccttctgtcccagggctgctgtgaatccatcttgccctggggtggcattatgtgacccacctccatacttgtctctctaaattcactgtgcacggtgttgttctctccccaccacctgtctcagcatggggtctttctgtgtaccggggtggcagagggaggaagaaaattaataacttgactctttttctgtgttttgtgatttattttccttttgatatatggtcctatacagcccagggctgccttaaatttcctttctccactaaggatgaccttgaactcctgctccatccccttgccttcacctcctgagagcctcaggagaacagtagtacaccaccaagctccactcattatgacttagtttacaggaagcttggcagcacattcagggccatacttgctttcggctctcattcagtgtcaaaaccagcatgaaatgcgaatctgtgtgtcagatccaaaagaaaccaggggtgaagttctgactgaggagctcatgggtttaccaaagcgcacaggggtccccaggctcactcaggactgcggctcttcttagctcttctcaccccacctcttactctaaacttctccagcatgggggtggggcataaggtggggggggggttcccttcctttctcccagctttggattcctatgtaactctgccattttggtcacacactctcttggttccctctctctcttcaccctctcctttcatggctgcctggttcagccagccagccagccatgttcagcctactgctttgtctctttgcttggtacaattccagatgcctctggctatggctgtccctcatacctacaataaaaccatctcctcaacaatacctcggagtagtctccttcactgtggagagtaggtaagccctgggagcatcctgctagcttccagcaaggccctctctgtcactgtcattctgaatggccaggggtgtacagacaccatgtgtgtagacagagggacccttgcttacacctcaagggtttggtcatagactacctaggtaagtccaaatggattaaagttccctgaagaaggttttgtaggctgattatcacttcctgattgcagggagtgggaacgttgcagatccaaaaccaacattctcttgggctatttttagtttctttaatacaaattgagcactggcctttactcctgactgttgctggtgtttttttccaacctggtcctgctgctgatttagccccaaataaacacacaaagacttatattaattataaaattgttggctaatagctagggcttcttattggctagctctgtcttaattattaagccataactactaatctatatatttctacatggccttatcttaccagagaacacgtggtacaccctctcttcccagtctctaaatggcgtctcttcgggagcctctctgcctctctcctcagcattctcctcatctcctggctccgcctatcttcctgcctctattggccaagcagtgttttattcatcaaccaataagagaaacatatatacagaaggacatccccatcacctgacctagtgtccttttgactatcaggtcaatctttggactgcatcattaacttagcataccactgccttctatcgcccagaaaactaagacagtcgtcggataacatctgaagtctacaactgagatcccaacggctgcagccacacccacagactttttttttttttttggtgtgaataaactctcttaactcctttctgaagtgggaattgtgttttgcatgctttgccttgacagtgagaatttggaagatttgtcctgtgtgctgtctggcctggctcagcaacagcagcaacttgtccacagggatataggagaaacagtagggtgtgatgggggcagagatcatgggagctggggctgagggtcatgggaccagggaagggcagtctgtggggccagtattggaagaggcatgccttcgggcatttaaccggaagagggcagcttggcaggctctaacagagccccaaggggagggaccctcattagcccactctcaagatggcacctgttgctgtcatccttgggaggaagggaacacctgctcttcatgtcgctgaaggcagaagcctctgtaaaaaaggtattgatgccacccagcacctgtctcgttcacctcttaaagatgccaccagaattttagaggggacacttttatgctatagtaatgatacaatgtcgcctttaatcccagcactcgggaggcagaggcaggtggatctctgtgagttcgaggccagcctggtctccagagcgagtgccaggacaggctccaaagctgcacagagaaactctgtctcgaaaaaccaaaaaaaaaaaaaaaaaaaaaaagtctaaaatctgatagataagtaatgatacaatgtatgcctggtctctgctctcaattcctgactcagccttctaaaactctgggtatctgggtatttcctgaaccatagatgagccaagcacatccttagatctcataattgactttgaccctggttcctgatactggcatctgagacctttgtgacttccagggtgacttgagtgtctgacacagcattctggtcccatggtacttcttgggtgcctggagattgtgacactccagtgagtgattctgggtcttctcctgtatggagggctggtcctgaaaaggacaaaccatgattagaaatttggaccaatagtgccaacccatgttttctggggaagggactgaagactgagttaatcattgagcatgccatctagaaaaatccctgagcagcaggacctgggggaacccagccatgtgttgagagggtggtgtcctccaactccatggggacagaagctgctgggctgaggcttccaatcttatcctgtgcatctagccaatgactcagacctcaccacaccacttaagataatagtctacacaccagagtgtcttcctgagtctgtgaacaagttccttaaactccccgcgtcatgggaaccctcttttataggcacttagcagtgtgacttactacttactacttacagtggggtctgaggttggggcctggcttgtgagactaacacctcagcctgagggggctaattccacatcagtgatatcagaatggaactgagtcacagacgtcatgtactggtgtcacccagagaacgtttgagcactcgagcgcgcgcgcgcgcacgcgcacacacacacacacacacacacacacacacacacacacacacacacctgccatcagaagtgtgaagtgtcaggtgaaagagagggactggtaattttgcttttcctgtctcttcaacaaagatggaacagagcagatagtcctgggaggaaaggctagcaggcaagatgtggagtcctcagccaccatatatgctcaaggttcctctgagaatttctgggaatctaagctgacccagtgtcccatatgtgagcgtctttttgggacccctggcacaacccttgtgccactgtatcttgggacacgagtatcacagctctatacccagtcacaggttgggatgaccccacagtagcctgggtcgctggttacacctggcttcctagtaaaggcacgtcagacagatgctgtagacaaagcaaacgaggtgagtccaggctcctgggcagagcagtgaagtgtggcagaggatagataggagaaccacagggacgtgcccaggcaaggaagagctacatcaagctgtcagagaagaaaagcttccggaagggcagagggcagagggcagagggcagagggcagagagcagagagcagagagcagagagcagagagcagaggacagccatgttgagactgagaagccagagtgcctaaggcacaatgcaggtggaaactgaagttcccgcagaagcttctgccggggaggggacatgcccatttggtggggtctaaggaggagggatggtttgagaaggcccacctagtcccatgggtatggggtaacccgggtcagagctggggaggggaggtgaacactgagttaacagagagggaggggatggagaatggccggctgtgtcctgggtagtggggaaggcaggcgctggcctgtagtagggagaaacgggtgaaaattcgttgagctgaggtccacgcctgctgttcatttgtctaatgtgcacagcgcctggatcagaagcacaaggccgaggccctgggttttctgtggcagctgcagtgtttccctcttcttgctgtcatctttaccttggcgcttgggtagtcacatgactggtccagaccctgaccttagcctccccaagggaggcagagcacactgtacacactgtccctacgggtgtctcttggccctggtctctgcttgaaggctcagtccaaatcctcctgagtgaacgcctagtgcctggagtagggagggctttgtgtgttggggaatgtgtgccctttggaacaatcccaagtgcttggtgtcttcatcctcgtgacagctcaaggccatgggtggggctctcttcagtatttaagtgagggactgagtgggcacaggagcatacagccctggctcagtagagctcaggtaactcctgatttctgagtcatagcttcttcctaggtggaacctaaaagactttctctgctctggtcctcaggcacctgcttcttcagcctcatcatggctgcacccctgctgtctgtccctccacagagttgtccaaatgacttaacactggcattcccagccagcaccatgcttcccatttgagggactgtgggtccaccacgctggtttctccagtgtgtgttggaaaagttatgatgtagctggatgtggtggtacatacttgcaatcccagcacttgggagatagaggcaaaaggacagggtctcaagactatcctcagccacatagtaagttcaaggctatcctgagctatgtaagacctcctaaaaaatcaaacaaaaaggaaagaaaagaggaggcaaagaaggagaggaggaagcaaaaaagcagctattttgttggcttttagggatcagggtctacatcccgaggagacttcctagaggcccccactccctgagaagtgtgcagtacagacaaccataccctttctctttgataaccaatgcatggtgcatctcccaaatcagttaaggcagtcaggaaaatccacccaagaacatgcccacagaccatctccatcggggtggtccctcacagagactctcttctcaggaatttctaggctacaatttcacagttaaaccaactgtcacaaccagcaatgtaaggaaaaagagagcgcacactctgagaaataagagttccagtgtcgggattgagtggactccataggggttgctcttgggttacaaatatctccagccatccctgaacccagggggagactgtgtagtgctcccagacactcctaagtttagtaccctgaaaggacttggggtacagctaggtggcagagcccttatccagaaggtccacccaatccctaacaccgcaaatatgtacacacctggagttgttttgttttatgaacaataaaggctttttgaacattcggtcacagaagatttcaaaggaaaaaaatggggaaactaaaaagtgtcagtggggtcctgccaaacgattcagcaggtaaagatgcttgctgccaaacctgatgccatgagttcaatcccagcaagccacatggtggaaggagagaaccaatccccccacaagctgtcctctgactctacaccaacctcagggtcttcaagcacagatgccagtgtccttacagcacatgcaaaataaatgactttttaaaggaggggtctagatacgatggcaaggctagccttgaactcaatgtcttcctgcttcagcctttgggtataccaccaccaccagttattttatttatttctgctctaagctcaacaactaactcccttctttctgctctcttaaaggtttagtttgctcttttattggtcttttctcatgtcttaagttagaacattagttactgactgtgctggctagttttatgttaatttgacacaaaccagtcattgaaatcgggagcctcaattgagaaaacgcctccataaaatccagctgtagccaggctttggtggagaacgcctttaatcccagcattcaggaggcagaggcaggtggatctctgtgagttcaaggccagcctggtctccagagcgagttccaggacaggctccaaaacaatacagagaaaccctatcttgaaaaaccaaataaaataaagtaaataaaagatccagctgcaaggcattttcttaattagtgattgataggggagggcccagtccattgtgggtgatgccaaccctgggctggtggtcatgggttctatcagaaaacatgctgagcaagccaggacaagcaggccagtaagcagcactcctccatggcctctgatcagctcctgcctccaggctcctgtcctggttgagttcctgtcctgacttcttcaggaagtggaagggtaaccaaaaaaaaaaaaaaaaaaatccttcccttgccaacatgcttttggtcatgtttcattgcagcaatagaaaccctatctaggacagaaagaaattggtaccaagattgtggagtattgctgtgttgtttgggggagggattgtggaaggactttggaagtttgggcagaaagcccactgaatgttcaaagcttggtgactgctctgtgggaacctggaggataagtgtgttgagagacgtgcagaggatgtggaggcctagtttgtggggttccagagggaagtttgaatcactcagagactgatggacctgctgtatatttggagttatgaatctgcagttcttgtcagcaagaattgaagaatcagctgtgattaacaagtgacccaaaccaataaagtgaacctttgcctcactgggataatagatactggtcaactggagctaagaaattagcgatgattcagaaagaccagcatcactgaggtgaaatctctgggaagtgcttcctgggagtcagcacacagaagctgtgttccagaggtggccaaagctgtacacttagtaatggaagcgtcaccgtggtgggactggttttgaaggcaagaagggtcatggaaagcagctgggtttggcccaggagtggccactggtgaaaatgcagcctcaggagcagctgaagctccaggactgaaggggtcatgcagagaatttgagtcttggcacgaggaagagccctgaggaggctcctggtggagagcaccccagctgcagcaggagaccccggcgttttggagatgccggtaccatgggaagatcaccaagaacagcagcattggtggactggagtcatctggagcctagaaaacaagctgcgtgtgctgcagagggcagagccagagaagtgactctggaggagcccagaagatagtgagtagaatccagacattggacattgagtgatttgtactgctggagtttggttttgctttcatctgattgtgattgtgccctggttcttccctcttgaagtaagaaagtatttaactttttgttttttttatttacatggcccacagttgaatgactttgaacttttaaaaacatttcagaattttacagatactttggattttaaaagagactgaatattttatattttattttgttttgttttttggaaacagggtctcaccatgtagctctggctgtcctggagctagctctgtagaccagactgacctcaaattcacagagatctgcctgcttctctgcctgggactaaaggcatgtgccaccactgcctggcaaggctgaatattttatgacagaagaggacaccagatgccactgtagatggttgtgagctaccatgtggttgctggaaattgaactcaggacctctggaagagcagccagtgctcttaactgctgagccatctctccagccccagttgaaaattttaaagagactgggttttttgtgtctgtttgtttgaatttttaaagactgtgggacttttaaactttggaatgtttatattgtaatgttgatattcctgtgtgatcttggggatgaacaagaaaggaaaggttatagtttagcagtgattgtttgtcaagttgacaagggatcaattgtgctggctagttttatgtcaatttgacacaaactaggtcatctgaaaggagggcatctcattgtagaaaatgcccctaaaatacctggttgtaggcactctcttaattagagactgatgggggaaggcccagcccatggtgggtgatgccatccctgggctggtggtcctgggttctacaagaagccatgatgagcaagccagtacgaggcactggtccatggcctctgcaccagttcctgcctccaggttccctctgtgcttgagagttcccagtcatgacatccttcaaggatggactctgatgtggaagtgctagccaaaacccctttcctccacaacgtgttttcgtcatggtgtttcatcatagcaatagtaactaagacattgactttggaatagagatataggtatatagatattgagacagtgtctcactatatagccctgctggcctcaaattcacaaagacccacctgtctctacctcctgagtgctaggattaaaggcctgtgccaccacatccagattatcattttaatgtttgtgtgtgcccgtgcacatgggtgtatgcacacgcatgtgtcatgctctatgtgtggaagtcaaagacaacttctctcctcccactctgtgggctcctgggtccaaattcaggtcatcaggcttgtcagcaagtgcctttacctactgagccatctcactatcccaaccttgggccttttgtctaaatctgaattcccctctctccactgctctggcttgactctacaagttttgcatgctttatttttatttctatgggcttagcagtgtcttctaatccccttcatgatttattctttgaccggatgtgatttaggagtgggtttttgggttccgaatagtcatgcttttcctataagtatttctgactttgtcttccgagttcccacaggatacccgtgttccttgactcctagacctctacattttccaacccaggagtcttgtcagttctgtgccccctgccatcactgcatctgctcctattctttgtctctctctttccttcataagaacccttaccgagttggggcacttgaatgaagccgagtcctctccatcatgggctcttcagcttaagtctctctggtaagtcacaggcacaggaactgggatgctgtgccggttgtttctctgttactatgataaaatgacatgaccgagagccacttacagagggacaaatgtttattttggcttgtagttccagagggggagttcatgatgtcaggggaagcagtgcccagttaagaacactggctgctcttccaggggacctgggttcaattcccagatcccacacgatggctgacaatcatctgtaactccagttccaggggattcaacatcttctaagagtatggcgtgctcatgatgtacacacatacatgcaggcaaaaactcatacacataaactaaaaagaaatctcaaaaacccctaaacaaaagcacaaaaaacagtataaaaaaataagatgatgctaacacttgttaccaagtgttgtcgagtgggttgtacctgtgctattttctggtcatactgaagatgctcacaggagaaatacaagaatgaatgaatgaatgaatgagagctgggaaacagggattgtgttgtgactaaccatgtattattaaagctttgtgtatttttcaattttgtattgtattaatactttttatgtccccccccccttgggttagggattacaaaggcagaggttgtaattatctgcaggcgctgacttgtagacaccatgctttcaaaagggcacccaccctcaggaggattctcttccctccagacatcctgccctagcccccttccttctctctgagacaaaaaccgtttcacagcaaactcccggcagcagccaaagaaaacagagccaggaaaaagcagcgtgggccagggaggaagcaaggttctgaaccctggctgataacattcttcaaatcaaagccacaggacccaccacaatggtgaaggagttcaggggatacccaggggacacccagagccagtcggctggaggccagaaggtccctagcctccatcagtccaagtccctcagctccaagctggataagaaatgaaaaacaaatgccttcgtccacacaggtgaagaccccagccaactcctgggccatttatttaacaaatgtaaactgaaattttccactgcctgaggagggcaggcggatgacaggaggctatgcaccttgctcactcaccggctggctccttcctcactcccttcctcgggtgtcagtaggctgcccctgcaggacacctgtcattttttatttttggagctcttactgtctggactgctgtgggagcagttgctgtagctgttgtgactgtttcctttctgacctgcaattgcctaaagcagcatcccaccccctctgggacagaacatcacagtctgcaaactgtcactgatgtgtcaggagcattggcgtgttggcctgtagccttgcttctcctcggcttttcaaaacatttaccgctgagggcctcgtgggcctgactcttcactgcgcggaatcgggtgaaattgctccttaggactcagtggccaggaaggaaagtagcatttccttcacttcccccgggcacagctcacacttcctccccacccttccctccaaagcccgggccacagtgccccctggtggaagcatgaggcaacagcctgggagagcgcagcctcgccctcaactcccaaaggcccaggaagtcaggttaaattggggagagctggagccaggacctggggggtacggggggggggggcagacagaataaagacagacatccctgtaaacagaaatcgtgagttttcaagacaagctagcaactcccagttaaaacaactgtgtagggcaggaaagagggctctgtataagggcatttcttgcttttctgggggtttcaggtcccatttccagcacccacttgcaactctccgtaattacagctccaggggcatccaaggcctctctagataccttcactcacatgcaaatccccacacatacatataagaaatcttgattagagtgcctgtgactcacgcctttaatcccagcacacaagaggcagaggcaggtggatctttgtgagtttgaggccagcctggtctacaagagctagttccaggacaggctccaaagctacacagaaaaaccctgtctcgaaaaacaaaaacaacaagcaacaaaaaaaaaaaaagaaaagaaaaatctttaaaaacagatctttccagaaagtcactttacttttatacattgtgccacctggactttctctatttgaaacttctatattatcttcaaaaccccatttacatgctccctcccagaggtcttttgggcagcctaagctactcagccttccacacaaacactaatccccaatctctgggagaacagctaatatatcacatacattagtttacacacctttaaaggtttgtttaaggcgtgtgagtgttttgctaggtatgcatgtgtgccacatatgtgcctggtgcccacagaggccacaagatggagtcggattcccctggaactggagttgccgatggttgtgaaccaccatgtgggtgctgggaatcgaacctgtgccctctgggagagcagcaggcactgttcaccaatgtaccgtctccccagctcgtttatacatctttagacatgagacatctactgtgagttgtgggctataaaactgggaagacacctcctagatggagtcatgtaagattatctactcccgttttgttcaccctaacccagtgactgcctgacttaaggtaggtaggttcattttgaggcatgtttaaaaaataattgtttctgaatatttgaagcagtaacaatgtgttatccggagttttggattgtttgtgtgtgaaagcgaagttcccctccttcctgagtctccagtcacctgctttgctttctctactagcagctaataacatagttactaatgttttcataccctctggataaagtccacattccccgcggccttccctttctgtggctttccctttgctgtccagcagagggcggagctcagttccccttctgaaccattaggcaggcctgcttgccactatgtggtgcagtggtttctctctcccagctcttcctcagggcgagcagcttcttgctcatgtgcagacttgtggtctgttggcctctggggatgggaggatacacacgcatgctgaggaggcagaaagggcgtgtggagggccatatgcagccaggttcttccaaggccccgtgtgcgacacaatgtgagctatgccagctcctcctggtgacacggcatgacccctggctgataaatggttcctgacgaagacagcaggtgcctcccacgtcagcagacccctccaagacacggatactgactgactggtgacttttgtgacatcctctgacccagtcagcatggtgaatggatagtaaccctttgcaagtagcttggtctgtgtttgatgacgagctctgaagaaggtagctgaagcaagcttccttgctcaggccgggctgaagacctgctgctggaaggagaaaattgtctgtacaacctcgagagaactacggagcccatggtaaaaagaagcacgcgcgcacaaaggcaggtcaagcaacaagctaactgtcccatggtgagatacacatcttatactccccaggagctcctccctgcgtgcaggtgctcacccaccctcactgctaagctggtctgcattctaagatctaactcagaaagtggaaccattcctagcgcccttttgctaactgcaacccaaaccctaagcccgacacccgcggtagctccacttctctgaagccttccttccccacaaacctgtttttgttcccagcctctaactcagatgacacaactttctctaacttttccatttcctcctggtcgctgctgatatctctcacttatctgctgtgttttctgcttccttgcttccttccttccttccttccttcctttctttctttctttcttcctaactctggtaaagttatctttgatttcccttctgtttaaaaattcttttattaataagacacaactgactgacaggaccctgtattttctttcctgtgtctgaggttagttgagttgtcaactttacacaacgtagagctgaagcgattactttattctattattaaataaaactcaggagtcaggttttgaggtaaaaatccgatagctccagagagtgatagaggaatgatcagctggccctgtctcttgacacttccagactgaaaagactggatttttccaggcccctacctaccacttcctgtgccccgcccccatctccatcctccaagacctccttggctaatttcagtcagccaaactttgatgctccctctggttcaaggtaaactctaatatcagtgttggagtgttagtgtgaacaaatatctcccaacaatccccccttttgtctaaacaaaaaagggttttaactctaacgcagtaaaactatatacaataagaataattatcgccgggcagtgatggcacacgcttttaatcccagcactcgagaggcagaggcaggtggatctctctgagttcgagaccagactggtctataagagctagttccaggacagtgtccaaagccacagagaaatcctgtgggtggagggtattacattcttgttttccagtccatttggcaaatttgaagaaaattctctattatctgtcctatcctagtgagtccagagttttgtacctaaatcactcctttcttttttctttttctgtttttttgtttttgtttttttttttttttttttggcttttctaagatagggttcctctgtttagccttggctgtcctggaactcactctgcaaccaggctggctttgaactcacagagatcctcttgcttctgcctcccaagtgctggaattaaaggcgcgcacccccccccagcccctaatgcactttcagtcctagtttgtattaccaacccaaaactatccttttagacatcaaaacattttcttagataaacaatttaagcttttatgtctcctaaccttatatactttacacctcttttgtgagtttcttttgtgaatttggtaacaaggaaaactaactataactatcatgtcttcagcttcatcagaggcccgggaaggatataatattacctgaataaacagcaagtacaaggcaaacatcttccaaagctacagaaatgacagaagcagccggctgcctggaccgtcaaccaagtttcctctgcaatgttgtagcatccatcttcagcatacaggcctagaacatctgacagaacatttttttgtgaagcgggaattttgaaggactgctgtcttgtcttggcaaagttctgcaatcactctcttttgtgccctgcttgtccaatttggacagcatactgtcagcgatggaggcaagggcagttttttgccatatggaagttctttggtgcccatcatcttttttttttaaagtaaattggtgctgccagaagcaaatgtgtcttacgtcatgaagactcttgagttattaatacattttaaagccatattctgtaggtctctgaagtgtataaaaaccatctatctatctaaaatatatctctgcctgactttaaaaacatacctaacatggcctaactttgttctggttgactactaacctgcatttcttaattatcctaaatagtttgtaataataattttcaaggactagaacattgttaaatgagctgcacaataccttagacaagagtagaaacagtataacaaaaattaccttaaatttgtatcaatatacaaaaatccataccaatgtaaaatttttgagattagtagttgcttttttaattaaaaagtaggttcaacaacctctttcccaccatcattcctatatccctccttttttcttttcaggacaagatccctgaatctaatttcctttgcttagttttctccctgaccattgccaatgacaacttgcgaccaactcccctatgtgataataaacatccatgatccttcaaatggccagaacccacccatcccacctcttaggaatgtgggcatcatgttcttaaaattacttcctgttatctgggggcaattgcatctttaagggaccctgagaaaattgacataatggtcaaatcctgggagatgtagttcttgtccagtctcagtaagatgggaaagtggggcttatctgaagtcctgactggaatagtctatgaggctggaccatcttagctaaccgctttgaaactgtcctgagcagtttgtagtcaaagctgatctttgcgtggtgtttgtcagcttagtggcattactataatccgggtggatttgccatcgcagagccccaacagcattttggagacctcaagatcactgccaggaatggtcatggttcactgcagaaaacctaagcaattttaatgtcttatgcagcaggtctgagaggttaaaggaccataatctgttatgttgcgaccgcctcgaccagcaaggatgacgcaacaccggagctcttctggcaagcagtttattcaggaccttgaacagccatctctctccttgggcaagcctctcccagcgcttaaataggcatggaccaccaaccctggattgccacatggacactgtccacaggtccacgcatacgcaagcgcttacgatcatctggccttagccatatatggagttgtttttcgaagagagcgctcgctttcgggatctcggagggcgggagccagcgccatctttaaagcccggctccacacagctctctacagttcccccttttttgttttaaagcgctacaggcaagagtagaggtctgatctctgttgaaatggagcatgtactaatgtctgtccaggtgtcatccacccagagaacactagaccagctcggtgcccttttcacagaggtgggacttagacaccaacccacatgcaatcagacttgctcttcttgaggctgatggatgttgacctcaagtgcagtgcgcaagcctcgcatcctgtgctcaaatatagctgaccaagcttggggggactgtcctgctccaacggccgtgaaggcctgaatgatcatggccacattgcgacgctgtgagaccctcatgcgacaaatgcaccacaggcacgccagggaggcaagtaccataaagcctgtcagggctcctatccccgcccactccttaagatgattcatggctgtggggatccaggaggacaatccttctgctagaccggcgtccatgcgagtggaattcacggtcactatcgccacccgcagcttttccaattgttgttcaaatgcaccagaccaattacctagaaaatagctagacaattctttagataaattagctgcacgagtaaagttttcatactgaatgctggttacacacagcccaggaaacttccactcacatccaagttgagctaattgccagaggacatcaatttgttcttgaaccaaatctatgcgttgattgacaaccattagtccaccttttaactggctatctattccagtttgtgcctccagtgcgtgtgccaccgaggcagataaattatttaatgtttgagctgtctgtacagtatgggtcatggcaatagccgctactgtacttgccgtagcagcaagagctacagcggtgaccaaagctgtcagttgggggttttgggcagtcttatcctggctccccaggtgtctggctgggggccttggcggtctgacttgcaaaggtcaggaatttcattgctgctgaatcctctttccaactggattatgtttgactcagtgcttacgtctctggtctcgaactcgcagaggtcaggcagcctctgggtccagagtgctaggactaagtcgtgagccaccaaaatcctgcttatatcttaaaaggctcatggcgttaggagcatccactggcacgggaacccagaatggaacgcgagcaatcatggcaaagctatacttagaagcattccagcattgggtatagaagcaagtctcattgctacatttctgcaagctataattactaacaataaacataaatggtggatgcacagacacagggatagctgtataatgttccatctaaacaacgaccattaattccacaaagcatccaaatactaaaaggatttagaagatctgtttgttgaaacaaaccctgaagatattcttctgagcccactctatcaggggaaaaggtaaatttcttacccttatctgcccatcttagcactttggattgacacccggtccatggccagcgctccccttcaaaggttccctagcaagtaggggcccacttgggttgagggggaggagtggaggaattgtcatattgacaccaaggccatgtaccgttccgccaaactacctttgttgaataggctgtggtaatattttcttggttgatggaagagttataagaagttgactgagccctgtacttacgatacccatcaaaccatcctgcactaaacctgaacaaattaatacaggaactattagcatcagcaaaaacggtaaaacataaacttccctcattagttaaggatctatttttttctataggggcaatttcgctatctattggaatatagggcaaatttagcttgttggtggtggtgaaaaggcgagggaacacctgagcatcatgtcgaacaggcatcggcttggggaaggcagatagaattccccaccgtggctccactgtcgccttctccgatgggtgagtgaggagcacgctcaggatccccagaagtatcggtatcatcttgtctcgcgtcctcttgtatttgcacctttcttaccaggcgttccggcacccaaatagggtccaaatgatcctgtggaaaaatacaaacagagcctctcgcccatgctaacactgggtccggtccatgccatagacccgtaaggatatctttccatcttacgtagcccttctgagcaggtgcctgagtctggtgcctattggcagcagaaaggccttgagaatccaaattcaaaaaattcagagtaaagagagccaaggatagttgttcctttggtgttctaccatggcctattccccccttttgttttaataaacattctttcaaagtgcgatgagctctttcaactattccttgtccttggggattataaggtaggccatggtttaattggacttccatctgtttacagaaggaggtaaaaggttgagctgtgtaagcagggccattgtcagtttttaattgctgaggttttccccaggcatcccacgcctcaaggcaatgtccaatgacatttcgagccttttccccactcatagggtggcatggatgatgcctgaacaggtatccacagacacgtggatggaattgtgaaattgctgcgcccgctccacaggggaagcaaaaaaatacatattcccctctagtacagtgatctacgatctcattgccttttgatagaggtccgggcaagttggtatgagccctaatatgttgtataaaaaatttctgatcgagatgccagatcaacttttgcaactcctgtaagagtttgcaaactgtactgttaggtttgataggtcctgcaacctccagggccttaacagcattcacaacatatgccaaatcagaaattagattaaaggggaacgggcaatttctaaacacttcaaagacaattttacattcaataatcggggggagccaggctgatattgaaattacactgaatcctgatgctctatcatatagtctccacagcctgtcttggatccatcagtgaaaatgtttgtggctccagcaataggagcagctgcagtcattttaggaaaaatgaccggatgttctttaaaaaatgacattagagggtgttttggataatgattatctatttctcctgaaaatccgcagcgcagaatggcccaatcatccacagttccacaaaggatcttaacttgttgagcagtatatgggattatgatcttatttggtagcctcccaaaatattgaaggcattgctgtgtcccattttgagccaagtcagcaaccgctgcaggatagtattcaatagtttttcctggggaggatttagaatatatccacagtaacggaccatcttgccacagcaaagctgtaggctgggtgaatgttgggagcacacacaaaagaatatccatattttctattagccgtttaaggctggcattttgtaattctgtctccactttctttaaagcttctctggcttcagccgttaaccgcctctgcctccttcagcacaaccggccagaaggtggagcaaccagaagctcctacttcctcttgcgagcagtaggggggaggagcaacagggcggtgcctttgcttcacagccgccattttagggcgctgtttttctggtacttttaaggaacgttccaaatctttccctaacttatcccaaccagccaccgagagattgtgaaccagggtgcaatggcgtcgcattcactcaggaacctctgcaacgtggctttagttaaccttaaatttttagaatgaagcagctcttgaagagccagaaaaattggatgtgattgtaacgattgtgcgctccgaaggctcgcacaaggtggtggataacaccgccaagaaacaaaagcccacactgcaatgttacaaagtatccaaatcaccactataatagcggggtccattctctttactctcactctgcaagttaaagcaggagcgaggtgtttactttcacttgtaactggtcggctctggtcggggctctaccggcccgctctccctttacctacaggccggatccccaatctcacctgagggcttaccggtgcaccccctgactgcagcaagttctgggctccacgaggtcgttccccaacgggcctccacttgtcaaccgcctcgagaggatgacgcaacaccgaagctcttcgggcaagcagtttattcaggaccttgaacagcgatctctctcctcgggcaagcctctcccagccttaaataggcatggaccaccaaccctggattgccacgtgggcaccgtccataggtccacgcctacgatcatccgcttacgagcatccggccttagccatatatggagttgttttttttgaagagagctcgggagggagccagcgccatctttaaagcggggcagctctctacactgttaaatacatccagggtacacaaacttagttcccagttacctgcttcagactcatgcctaaaatcatgaacaggaagcttgaaggagcctatttttagaattacttagtaatttatacaaccattagtatcatgacaaagtttaaatgcatataataatctcataaactttgagataatatttataccttaataaaagtcttaaagagtcaaaataaaaccaaaggattatgaaattagtggcaatacaatagtcccttaattttttttttttctgtcccaaatcaggtggctcttctgacatgaaacagacttggatttttcttgggtttagagagggagaaagccgcattccagttccaaggccagttttaatttttaattgaattgggactacaaaaaggcaatttaccttatatgtctgtagagaacagcagaaacaaacattttggaagatttatgaaattctatcctgttggaggtatgctataccattaggccaatttattttttctgttgcagcattttctcttgatttgtccttcttcagatgtctcatttgtccagtgggcttcaggtttcttagttggatgttttattcttctggaaagatgaaaacaaaactttgtctcaaccctaactttggggagttccatttttttgaagtttatatctgacgaaattaaaaggatctgttagtcttgtaagttagtttggactaaagggacatgctgtttgataaactattgtctctcctaatgaagatatctctcctgttcaaatctaatctttttctaacttgatgataaccacagcttttttctttctttttctttttttttttttttcttttttggttttttgaggcagggtttctctgtggctttggaggctatcctggaactagctcttgcacaccaggctggtctcgaacttacagagttcagtctgcctctgcctcccaggtgctgggattaaaagcgggcaccaccaccgcccggcaacaatagcttttctactcctatggaaacaaaagcaaaacctcttttccaatgtgacaaatatcctgttttccattttgaggttaacacatctttaaaatatataggctgatttaatctagcagtttttttttttcctactatccaacgtctctccacagctgccgtgttttttttttttttattagcgttttaaaaaatttaaagttaataaaccattgtgtaatctacctctggggggggttctttattacctcttcctgtttgttaagcatatcgtttaaagtatgattagatcttttataactgtttgctttgcaggattgtgtggcatgcttataatatgctttatgttataatatgaaaaaatttttaccagagtgtggacagaatttctgtcccacctggtcccacaactgttttgctccaaataaacacatattaactatgaactgtttggccaatggcttaggcttcttactggctaactctcttaattattaacctataactattaatctatgtatttctacatgaccttgtcttaccagagaaggctccatcatgttactccttcagtgactacatggcatctctctcatgccctctctctgagtgctctccccacattctcatctcatagccccgcctatacttcctgcctgactatcagccaatcagggttttattcatcaactaataaaagaaacatatatacagaaggacatcccccatcatctcctcttttctgtctaaataactttaacataataaaattatatataacaaaacagttatcaagtaagtactatagttaacaatatttagtccgttaacttttggcaaaatttaaagatgttatcttgtctttgtataagaatttctgtagggctggagaaatggctcagtagttaagaacactggctagtcttctaaaggtcctgagttcaattcccagcaaccacatggtggctcacaaccatctgtaacgggatctgatgccctcttctggcttgtgtaacacacaaaataaaaaaagatccagagacaggtattggggttgaagcttcaagctgaagatcagaaaagcaaagcagctggccgttagctcttacatctacctcagctcagaccacgggggaaatccgcaaactacttccgacctcactgcccctcagattcactcagattgctatgctctcctcaaagtggctagagactaaacctgagactgactgccttcctatcctcaatgtgtaccagagaatgagtgccagctctgagacctgcccctcctgtctcagatacctccctaatgctgggatcaaaggtatgagctctgttacccttcactcttatggaggccatggtggcctttaactaacagagatccatctaccttttaatcctgagtcctgggattaaaggtgtgtaccaccactgcctgatctctatagcttgtggctgactttgctttctgaatcctcagtcaagctttaatacatcataaataatgcatcaccacaggcttgcaggcatacatgcaggcagaacactgtatacatatgaataagtaattctttttttaaaaaagaatttctgtaggagaatgtgtagaaggtaatatcaccagaatataatcaagctctgaacccaagcgattcacagatgcattctgtaatttctcttctaccaaagccaactctgtgtcagccttagctaataacattttttgactattaagttcttattgccttgtaagatcttgatggcaaagaactgccttgcttgttgcttgttgacctgcatttattagtccaatgcctgcctttgccacacctctgtatatttcaaacagctgggccttctgtttggattatctctagaaaaacattgtttctaggaatgccttgcctatgatcccttttcagatgaccttgtttaccaaaataaaacatctgaacttttgatttcctaaaaatttttagagattatttctccgatccaagtagcagcataagtgtgagattcaatatcagctatattcagatccgcttaagccagacattggtggcacatgcctttaatcccagtactcaggaggcagagacaggcagatctctgtgagttcgaggccagcctggtctacattgtaagtgccaggacaggctccaaaacaatacagagaaaccctgtctcgaaaaaacaacaacaacaacaaaacagatccacttaaatacaggtgctgatcttgcctttaaaggcataattacccttttgcattccaaattagcattttcaaaagccaaagattgaattaatagttgtctaacttttagatctgatatcattctacttacaactgaaatcaatctatgtaaagaatcagtggtcattgtataattttagtaaatgactcagctttgttcctgattctccaaccctgtcccaagcattcaaagctgctatatgatataggaccatggtgtgattgtcaaatccaaactgtcaaatcagcataccgacattcaccaaagaactgatcttgggaaacatgatacctctagccccatttcgctgttttatgaccctagcttcctcccaccctgatcatgattgtaactgagaaccagcttccaatactgctgtagctaaatcttttgagtcttgtggaataattctgttccaagttgctcttgaatttaacatttgcttcacatagggtagatgcatattatacgaaataactgtttccttaaatatccttaaatctaatatttttacaggattccagttaacttctgtagagccttgagggttcctgtcatctgaatatcattcattcatgtctggtaactggataaattattattgttattaattttgttttgttttatttttccagacagagtttctctgcatagccttggttgttctggaactcaatctgtagactaggctggccttgaactcacaaagatccacctggtgggattaaagatgtgtgtcaccactgcctggccttaggtcagattctttatgacaccattaaatgcaagagttgattgtaaggcaaaacaaaatccactatgaatgacaaggcaccaacaattttgttcttaacttttttgctatactgtgatggtagtatagggtgaacacggctgccttcttaaaaattagcattgtagggtagggtacagttggagtttctttggggcctccagctcacaaataacaacattaattatcttattaattatgaaagctcagtcttagcttagaattgttctcaaccagctcttataacttaaattaacccatttatatcaatctacattctgttgtgtggccttacctttctccctactgcccaccctgctttctccacatgtggctggcaactctgactttcttctttccagagccctctctgtccccagaagatcctcctaacctctttctgcctagctttcgggccattcggctctttattaaaccaatcacagtgggacatcttcagtgtagagaaatattccaaaatagtaagggactggagagatggctcagccagtaagagcactggctgctcttccaaaggacgctgggtcaattccctgtacatacatagcagctcacaactgcctgtaactccagttccaggtcatttgacaccctcatatagagatactggcaggcaaaacaccagtgcacataaaataaaaataagtcattagaccgggtggtagtggtggcgcacgcttttaattccagcacttgggaggcagaggctagagaatctcagtgagtttgaggccaggctggtctacaaaccaagttccaggacagccaaactgttaacacagagaaaccctgtcttgaaaaacaaaacaaaatcattagaaaatcatcgttgtatttcctaaagtttcaaattcaaaactaggcagactatacagtcattgctgcggactcacaccaatacctggcctgcagcagggccggaatgcaggagcttgctgaagccaagtgctcagtgagtaaacactctctcagggtctctcgttctctcctcatcatttcaaccaaaaaacagtgaagagaaaagcagacagatgactagtggctcttcagcctcccatcagctgccaccacaaactaaggcgtgaggtctgcaaacacgattgacaggggtgattctctgtttcaaagtcactgtccccagaactccgaggagaggatctaggcaggagagatgatgggtgatggtgagctcacagagcagagaactggcagtctccacggtgaaggctctcattagtctgatcaaggagtcaagcaacagcctagatctgaggaagcccctcatatatagctgaggtcttagcaatgtgcctcaccactttacagccagggcaactgaagcccagaaagttcaacctatctgtccaggtaattgcttcttttaggctaactcacaagtgcctcctcctcctccttcttcttcttctttttttttttttaaagatttattatgtatacagtcttctgcctccaggctagaagagggcaccagatctcatttcagatggttgtgagccaccatgtggttgctgggaattgaactcaggacctctggaagagcagccagtgctcttgacctctgagccatctctctagcccccaagcgcctcattcttaacaaggatcactgtcttctccctccaaccagtcttctctcttaggttttcagtctctggagggtggctcgcccacacccttcccagactgctgtgatgtggagctgggagccaccacatctcgcttcttccatctcctgactgtgttacccagtccatgtctatcctccgggcctcccctgatgtgatggcttcagctggggctgatttgggttttattcaatccttccttcctagagcagacaggcaaccttcccaacacccaacttcccaggtgtcaacatattaagtcaagacaagtattcctgtcccgacctgcaggacgtcaacctggggcaagagagtcagagatagggaatggggacaagagacacagaaagaaggaccacaagacaggattctgatcaagtggcaaactttacttttctcaggctagcttatctcaggatatggggaggggcagaatgggttgtttgtgttggtataggcaggacattaggaaaccacagagaggatgtttggcagggtaaagagttcatgagtaagaaagaggtccaggaagggttgcctaggtggctgagcctgagggtggaggactgggttgtttcttttcttgagctgaggttctaaggagctgctatgtaaaggttaactatgtggcctgccaagcatggcctaggatctcacacccagccctgagatttggctcccaacatattcccatctgcccccactttctccctcatcgaatgagctggaaggttctaacaaagctgagcaaagggcagttgcccggctgtgttccagtcttcctccttcagcttcttcaggccactccttctgctgttcttgttcagaattcttcctcgactccatctccactcctactggagcttacatcacagttcaaaagctctgtcttagcttggagagagggctcagtggaaaagcgtttgctgtgtaagtctgtggaccttagttcagatccctggaatccacctaaagccaagtgtctggacatgagtctgcaatacctaactgctacagtgagatgggagatgaagacaggagagtcactggaaactctagggccggctaccctggtctacatggtgatgaacaagagtgaagtttcaaggtagaaggtaaggatccatagctgaggttgtccttgaacctccacactcaagctttaatgcactcacgtgtggacacacacacgcgcgcgcgcgcacacacacacacacacacacacacacacacacacacacacacacacacgtcttgactgggctttctgtctgtcactgtcccatggacttgaaggtgagctgtcagtcacccagatggacaggtgcctcatctaaactttaaatcttaggaaaagcctggtgaatgatcaatgcatatattgaaaggaacagaaaagttaaagagactcaaggctgtctcagacagctcagtgattaagagcactggctgttcttacagaggacctagattcagtttctagcatccacagagtggagaacaggcacctgtaactccagttctaggagaatggtgttctcttttggcttctttaggaaccaggcacgcacgtggtgtagacatacacgtatgggcaaacactcatacatataaaataaaaattaatatatttaattttattttgccaggcatcatggcttattatacctttaattctggcacgtgggaagcagaggcaggcaggtaggtccctgtgaacttaagaccagcctgatctacctattgagtgcgacccatcttaatttttttgtttgtttgaaatagacactcctgccaagaggcctatctctagtgggggccatggagcccagacagaagcttgtgggccggagggctatgaccctcctcaggactgggccacaggagtagggcagagtatggccagggaaaactcacaaaattagcacatgaaaagagcaaactggcaaagcagcagccggaatgaccttgccgccctcacatgaaatcactagtttcagccactgtcagcagtggttctcaacctgtgggttgtgaccccttcagggatcaaacgacctgttcacagaggtcacatatcagatatcctgcatatcagatatttacattatgattaatgacagtagcaacttacagttatgaagtagcaacaaaataattttatggttggggggtcaccacaacaggaggaactgaattaaaggatcacagcattaggagggttgaaagccactgaactagagtttgtggaggtgacctaagggtcattatgatgccgcaacacacactcctcctgccaagagatttaagaatcattgtctctgatgacagtccaagcgacagaagaatacttcaaaattctaagccttaggttttttaaattttatttttattttaagtgtatgagtgttttgcctgcatgtatgcctgagcatcaccagtgttccagatatcggcagcggccagaagagggtgttggatcccctggaactggaatggcagacagttgtgagccgtgttagcgggtgctcttaaccactgagccacttcttcaggcactaattttattttttgcacatatcccccgtgtgtgctccacccccaccccccaccacgtgggccccaggaactgaactcaagttctcagtgttggcagccggcatcttgacctgtggcgcccccttcaatggatgagttaatcattgatgcttctgagacagggtctggctgtcatacatagtccacgatggtcttgagcttgaagctatgcccctgccgcagcctgacttttaaatcctgtttagagagctgtctaagaacgttctcaggctgtcctccattctggcagccaccttgcgcttgcccaggatatgtcttacttggcctctgtgcctgtaaccctgggccacgctgctagaagcctctccagtcgtcttgtctctacctgcggaggtttaaagccgggcgttcaagaaagttccacgatcgtccagagacctgccccaagtctctcccacgaaatcttccattgcttcgtccggcttcctttcagtgcaacttctgctgaaactgagtgcgctccttttagaagcaaaagggtaaacgatcgtagagggctggaaggtcacatggcacgggggtggcgtcgcattaaagcaggggtagggggcgaaaggggggaaacaaaggcaaaataaaataagagtgaccaccccaaggctgccacccgtgatgggcgtggtcctgcctccgccacaggtcgcgattccagctacagacgtttgcggggcgctgcggctgcgccaaccctggctcctcccacaggcccggagccttaagccccgcctggccctggcggcccgggagcccaggcctgcaccgggtgctttaacatgggtgcctccagctcctccgctctggctcgcctcggcctccccgggcagccgcggtccacctggctcggcgtcgccgcgctgggactggccgcggtggccctggggaccgtggcctggcgtcgcgtgcgtccccggcggcgcaggcggctgcagcaggtggggacggtgtcgaaggtctggatctacccgatcaagtcctgcaagggggtgtcggtgtgcgagaccgagtgcaccgacatggggctgcgctgcggcaaagtgcgcgacaggtacgaaatgggcacgggcgaggttgcctggcccggcttggaagtgtgaggcctcgatccgggcgcccctcgcggggtgcaagctttgtgagcccaagcttggtgacatccgagagaggggttccgcgctgcaagctgcgttctccccaaaccgagaaagcaagggtttgttgcgtctgggaaacacacgcacacatgggaaggagctgtcgccagctgtaacgccggcagcgtttgtgagcatgttcaagttgaaaccgtagtttgcaagttcaaaaatgtcagtggggaggccttccgagagaagaattttagccttacaatatgtgatttactccagagtggagcagagcacctggaatttggctcccgttccttccagcacagttgattgctcagctatcaagaaaaccgtggtttgctgccagatttccctgggttctcgacttttgatcctttagctgctaggcccatgcttcttcctgctaaggcagttttggaaaagtgaattggggcaatcctggacccctggactagagactcctctgtcacatgaccaatccgggtgttctgcggggctctcctaactgtaggatcctagaaatgttttcaagaatattgggtccttccttccctctaattctggccaccactttaataagtaaggagcagaattacatggtttgtggggtgggcgaagggggagcagatgggggtactatgaggggcagggagctagtcacaaaccggatcaaaccggatgtaaaataatcgtaaagggggttagaatgaagaaaagcaaagtcagtttgtcccggtacagaacaaatatatagatcaggaaacaggctcagccagactgggtgagagttcggctgaagcaggaccagcctgggctagtgtcaaatccagctgtcactgggtctaagggtgaacagttggaccccctaggtcaagaggcaaaactgagcacatagataattctcaaaccttgaaaggtattgttaggttgggaaagctgttccctggggcagattcgtcaccacaggtgtcctgaccacagtgcacccctgttacaataaatctttccgccaaaagccacctgatccctacagccacatgggccatctcggccagcctgagttctgcccaccgagttaggggcccaattaatgcacagagacttacattaggtacaaatgctgcttggccaatgactaggattctcatctgtaggctcagtcttaattatcataaatctatatattttataagatttatcttatggacgccttctattggcgccttcccttgacggtggatcacatggcgaatctggaggaagagagtaggggaaaagggaccacttcctgcttgtcctttcttaaatatgagtctccctgctatgtcacttcctgcctggatcaccacttctttactacatttcccagaatcctcccgcctaacatgcttcctcattggccaaacagtactttattcaacaatcgataagatgaacatacacagaagtactttccccatcacaccccacccacctggggctccttttcctcaccccacagccgggttgattttcatgttatccaaaggaaagcctgtgtgcatctcttacaggtgggtggtcttcaccaggctgagcacacagatttcattcttttaattagaatgtcttctgtggcagacatggtagctgtatgccgatatccgggcagaggaaggggtttgcagtggatatttcagggaccccatagtagaggccacctgctgcccagtgttcaccccaggacacctgtgcgtactgacccttgtagactgctgtcctaaagaaatgctggctcctaaagcactggaagatgttatctgaatgccctgcctgtgggctttgcagctcctgggcttttccatccctcactctcatcctaggtttctaatgctgggaggttttgcttgttttaagttattgttaatgcggaactgggggagtagctccgtgggtaagagagtgctttgcctggtgtgcatgaagtcccagtggcccatgccagtaatctccacacagcaggatcagaagttcaaggtcattccatgtagatcaaagctggcctgggctgtatgaaaacgtgtctgtatgctgaaacaaaataaaatactatcatttcccgaaagtcccattcctgtccaaatgaactcaaatcactaagaatgaaggcaacttttgtagtatgttgaagtctcccccggggtggttggtctgctgtaattaaagggttttacagagaaggggagggtgttgagaacatattgaagtattaaggataagaactcctgcttgaggctggaaagaccttgtgtactgggtactggctattgtcccacacagggaaggagctcagagtgttgacccaagtaggctgacacaggctgcattccttcccatttaagaacttgagtgttctcacaggtaaccactcccaacctgtgattcttcagatcatcagaggatgttgtgttcatcattacgattattgtggctttctgtaaataccgctagtgtagagagaaaatgtgccctttgcctctccctgcttttctgcttcctgaggagtcaataaaataaaacggtattgtttctcttgttttgaacaataaatccttccctccctcctcccccctcgtcctccttcctttctttcttgccttcctctccctccttccttccttccttccttccttccttccttccttccttccttccttcctccttcctccttccttccttccttccttccttccttccttccttccttccttccttctgttctttctttcccagaggatctcactattgtagcagtggctggcctgaacttgctgtgtagacaaggtcgtccttgaattcacagggatacacctgcctttgcttcctaagtgctggctgggattctgggttttaccaccctgctcagcacgagcaatacattcttaagatgatatggtctgggatggagggaaagtcagtcaaatgagtgtatgattgacattgggctaaatccatcctgtgagttagcccgtctaaggttgattttgtgggctagatacgaatgtctgcatccctcggacctaagaagtcagtattagacagaatgacatgtcacctaggatcacaaacccagtctgttctgggggttttgaattcagatctccgtgactgcggcactcactctttctatgattcaagtgtgtgatacagaaaggtaagaagtgcttaggagcaggagaccctgcacaaaggcattcaacctctccgagcctcagttttgtttgaaaaaaaaatgaagttgacctttatttattaaaggatgattgatattcagaagcaatcttgccggccagaactcagcttgactgttgttttctgccctgagaatagcacagctactggtgtttctggagggcagggaaagagccccttgctttattttgtgtctggattttcctctctattgccaactactggaggtttatttatttatttttttattttttgctagtgttcttgggccaccacttgagcttgactttgtcccagctccctgagctgtgaggtgttcaaggtcctcccagaagatgctaacctaggctgtctgctttgggagtagcttccctccttcaccttgtaaatgtccttatgcgtcaaccgtgactccatcaccttctctgtccagacccttccctgaagccggctgtctgtttctcatgcatgattttatcatcatctattgataaaggggaccccccccccgataattcctcttctcatctcccatctcctctttcaggcttagtccttcctgcgcccactgcatctccacccaaaccctgctggctagtttttaactggaatgagatttttcatttgccctgggctcagggtgacaggataatgaggcggctgtcttagttcattgtccttactgttgagacaaaacacctgactaggagcaaattaggaaagaagggtttgcagcaggatggtgaggccgcttgtcaagctgcgtccactgtcagggagcagagagatgaaggtcagggttcagctagcttcaccctttctgtgcagtctagaagccccgcccatgggatgataccacccacttagggtgagtctttgcacctcagttaatttagaagtttcctcaggagggcccagaggctattcaagatcctctcaagctgacagtccctatcaaccattatagtagccttttaaccgtttatcagtttttgtgcagtcccaaggttgaattctctcaaagccagatgccttttgccttttcagtcgcagcaattagcagggagccaccgagcaccccctcccacttttaacatcagcatttagttcccaagtcattacatggtggtctgggctaaagcagaggggcggcagctttgagaggggctattttgggtggatgggagctgagaagattcagcctagaggaggactgatgaccagagatgatgcgtttgtttgagtacatacgaatcttgtctggggatggggcatgctgcgagttactgagtctaagaagtctagagcacacgttggcgtctaatgagggcttgctgcaacctaagatagcaaagggcatcgcatgagtgctagaggcagctccttttggagacaataacttaaaccaaacggatctgggcagacctgcaccatctaccgtcagctgccacaccagggtggataggtggttctgaggtgagggagaactaaaggaagctcttgagggtcggggaaggatttctgagtgtatgtctatctgcctctctgcctctcttcaggttttggatggtggttaaggaagatggacacatggtcactgcccgccaggagcctcgccttgtgctggtttccatcaccatggagaacaactatctgacgctcgaagctccaggcatggatcagatggttttgcctatcaagctgccttcgtcgaataagatccacgactgcaggtgctctgcttggggacagtagggaaactgcaacagacacgatttttccttgcatttgttacagtttgtgtcagaactgtagaagatggccttggtgcaggaaaatactgaagaggggttagactatagggtggggcttgactgtgagtggctgttaagggtacctagttctggcttttgtttatttgtttttttattttactttggagaacgggggtctaacatcccaggttgacctctgatttgttgtgtaaccaagggtaactttgaacttttggccactgtgccttcaccttctgaatgctgggatcacagcctataccaccatgttcagtctgtatggtgctggagcttgaaccctgaactttgtgtgtgctaggcattcactgtaccaactgagctacagccttggccttggaattggttttaagcaagaatggtaagagttgcagctgatgaaataaatggctgtcacacaggaaaagctatcacttacattaatgggtgcctagaagtaggtagagctaacagagcgaagcctcgggctggccagagacaacttgaggaagggtaaattgcagcctggagcctttgcttgggcttctgcaggaaagagaaaaagcaaggggttaggcagggttcaggttagaataacttcagcaggggtcccaggacatagcagctatgtggcttatagccctgacacctgttccctgtaggtaaggactcaataaaggagggtttgcaagtcatgcttgcatgtgacaacactattgtctctaggaatatgtctctagctggccataggagtagctgtcccttctccaaggccttctacacagcgaagcaaaaagcatagtggacacagtgtgaagaggtttatttaataaggcgcacacatgcaacactgaggccgtagagctcagaggacaacttataagagtccattctctccttctgccatgtgtgttctgaggatcttaatccaggtcttcatgcttgacagcaagtgcccttgcccactgagccagcttgctagcccttggagagacatccaaacaagagactttaccagttgacctcaaagctggataacaagcacgctggaacttccccgcctccaagtgtactgttgagactgaggacttagggcaggggtatgtgtgtgggcaggggcaaggcctcagctttggcatctgtttatgtgtgggtcctctcgatgacccatgcatactggattttgccagaatttcgtgtgtgtgtgtgtgtgtgtgtgtgtgtgtgtgtgtgtacactactaagaattagagctgggaaggccttgctctttgatgttgggaaatcacagaaacttaggtgtttgctgagggatggtgcaatgttgtggatcctttgataactagatgagtgctggggttaggagcagggctctgtgcagactaagtgagctgtgccggggtacttcagctgggctccaaatgtttgggtgttttctcccccagtggtgagttcttcagcatacaccagctggtgtcccacactccatgtctaacacaatctgcctggagacagcgtcagatcccccagagtaaggactggtctcctgaaactgcctcccacttccgacaccagtagcctgagacagtagctgtgctggctggagctggtggctagctagtcgtggctagcctgagccacttccatagcctaaccctctggcccaccaactatgacttgactgcacagcctccttcttggggtcaagtcttcagaatgtgtcacggaattcaggaaacacgtttcccagttacttgcaaagggtactccaaggctaaggaggaggaggaagatgaagaggttgggggggggcaaggtgtgtggagtggagctcctgtgtgctttccgggcgtgctcagagaatgatctgtgatagccatactgtagattttgaatgagtgagtttactaaatgtatgtcaagccaaagtaaaagaataaatagcaagagggaggcggcagacaatagcaaatgtcatcaaatcgggtgctccatacgtctagcagaaatcaactcaggaagcccctttaagacagacagctgtcgttcccaacagagagtcccagtcagagcagagcatctgtcccccaggcgaagcttccaagtaaaagatcaaatagcaacagacagagatgacgtcatcaaatggggacctccaaaatacagcagagacctctggggaagttgagccagttagctagagttcccaactgggcgttttctctgtggctgaactttggccttctctttccattgcctgcacttttatattatgagataaacaatagttgaaaatggtttaccttaaggtgttttggggcacagtgttttcattctcaggctgtttgatcctcgctgccttagaggaagggggcagtccatgcctggatagagggcccctcggggcactttgaaacacatatgctctgatctgaaatgcgtgaagagagccaaccctctccagagccagcttcaccagggctcaaacaacactgtgtgctaagcaatctggaagctctctgaacccagccctttgggcttttattacataggtgtgattgataaaaataattagccattgataacttaatcctccgcttctgcccctcctctgaggtcaggggtgtggtagtacgggtcgtactaaagtccaaacctctgatcttggagggggatcccctggcaattagttcttgagggagttggttcatctaccacatggggcctgggaattgaactttaggcaaggtggcagttgtctttaccgtttgagtcttcttgccagtcccatgcttacgttttagtggaagaggaaggaacttcctttttggtctcacaaaaagcccttgaggtctagctttaaagactagctaagctataaaaataaataaataaataaataaataaataaataaaattagaataaaggtttaaaaaaagactagctataagtagcatttgattttacatgtaatttgacatagatgtatatgcaggcatagttaagttacagacagaagtagcagttgttaaccatatcaatttgtttcctaaaaataaaaaacaaagaaaatagtggctttgaccttgcaaagtccaacagaagttttattctttgtaactgaagagagaccaaaccaaaaaaaaaaaaaaaggtaaatgagataggaaaatgtcttagttatttttctgttgttatgaggagacatcatgaccaaagcaacttataaaagaaagtattttactgggggactacagtttcagagggtgagtccatcctggtggggagcatggcagcgggcaggcatgggtgagtccatcctggcggggagcatggcagcgggcaggcatgggtgagtccatcctggcggggagcatggcaacgggcaggcatgggtgagtccatcctggcggggagcatggcagcgggcaggcatgggtgagtccatcctggcggggagcatggcagcgggcaggcatgggtgagtccatcctggcggggagcatggcaacgggcaggcatgggtgagtccatcctggcggggagcatggcagcgggcaggcatgggtgagtccatcctggcggggagcatggcagcgggcaggcatgggtgagtccatcctggcggggagcatggcaacgggcaggcatgggtgagtccatcctggcggggagcatggcagcgggcaggcatgggtgagtccatcctggcggggagcatggcagcgggcaggcatgggtgagtccatcctggcggggagcatggcaacgggcaggcatgggtgagtccatcctggcggggagcatggcagcgggcaggcatgggtgagtccatcctggcggggagcatggcagcgggcaggcatgggtgagtccatcctggcggggagcatggcaacgggcaggcatgggtgagtccatcctggcggggagcatggcagcgggcaggcatgggtgagtccatcctggcggggagcatggcagcgggcaggcatgggtgagtccatcctggcggggagcatggcagcgggcaggcatgggtgagtccatcctggcggggagcatggcagcgggcaggcatgggtgagtccatcctggcggggagcatggcagcgggcaggcatggttctggagcagtagctgagagttgcatcctctcaggaggtggggacatcaatctaaatgagaatggtacaggcctttgaaaccttaaaccctatacccgcagtgacacctcttcccacaaggccacacctcctaattcttcccaaactggtccactaactggggaccatgtactcaaacataggagcctgtggatgctattctcattcaaaccaccgaggaagggcagaggcatgcttttcattccttaccacagagcgtgtcctctctgggtcctcagtgagttggttttcctctggcagcaaacctcctccagcacacaccagctgtcgtccagcacagcggtcctgactccatcccatagcatctgctctcacaggttaaggacttggtccctttagactatagctgacttcaaatgccagtgagggcggcagcctgactctgacttactacctgctccttgggtgctgttcgtttgctggagtgcctcttaggagctgagaaccgtgtgtgccgggtacttgtgaaggacattctgaaggctgagtaggagaggaattgcacaggtagggagttgaactctcgtgtgctttctgggcgtgcctccctttacacacgtctaggtgttcagcagttgagaaactctctgaacatagtccttcaggcatttatggaaactttattacatagggtgcttgataaaattatcagctgtcgattgacttaactttcagcctcttcccctcccttggccgtcagggactatggtactagagtccagcttgctgatcttgggcttggctctcctgacctcaggcagcttaggagcccagccatcagtgagccctgtaacacacaactgtccttcagcttcctaccgtcggcccccgtgtggactgttttcccaacacagtgtggcttccactctgtgagtctggcaacctgtgtgttcattctttagttcatgctcataaaaactgttcagcgtttttctgtaatatgaacactactctgtgagtattctttaaggtttatgtttatcagttttaaggatgatgatgtgtgtgtatctgtgtgagtctggtgcagggcccccagagagtatagatttcctgtgtatgccaggttctctggagctgcagtttcaggccatggcgagtccactgagtcccccaggagagctgcaaatgctcttaaccaccgagtcatctccagcccccttgcagacattctcatgtgtgtcttctgagagcacacgtgcaaagtgtggaggtcagttctcttctactatgtgggatcccggggattaaactcaggctgtgaaacttggcagtaaacccctttacctgccagccccaagacatggattttaagaataggctacctggatcatagcatttatttatttacttgtttgtttagagacaaagtcttgctgtgtagctcaggctggtctagaattctctatgtagcccaggctggcccaaactcttaaatctcctgcccctgactcccccatgcttagattataggtgcatagaaaacaggaggcactagacatgccgaactgttttctgaaatgagggagctgatttgtacctcctcagagtgggggccattgaagtttggggttagttcttcccagcaggcacaggcctggtcgaggaatacctgctgtcagttggaaggacgctggttgttcggcatcctcttgtcctgttgggtgctttctacttttccaagagccagtgccagtctcctgtggggatggatggtgtgggtagaagtgtgtgcagttacatatggctggtgttctgaaggagctataggacactcttggtaccgctcaacagtgataggatgggttttgagtagtagagttttagaagaatggcaaaaggtcagtcaaggaccaagagggacccatagatccaaagagtgctctaggaagggtttcagatagaaggaagggggcctagaacagtccttaacagagtgtcaggatttgacaacaggggtgtggtggtaatgcttgtgatcccagctcagggaggtgggggttttaagtcttcaaaggctcagaagttccagctattaatgagtattctgggtgttgctgttgagcgtctttgcacacatcacctcaggtatgctcacactggcacagacacagcattcacacgtgtatctgtgtgtgtgcagttctcatggtgtgggaaggcaggggaaacttccaagcaatcaatttccagatcctcagatccatagtttgcaccagggcccctccccactgccttagtcagggtgtcgcttgctgtgaagagacaccacgtccagtccacagcaactcttataaggaaaacatttaactggggtgggggtcgctgacagtttcagacggtcagtccattatcgtcatggcagggaggatggcagtgtgcaagcagacatggtgctggctacgtcttgatcagaaggcagcaggaccaagcgaagctcctgcaaaagagacctcagagcccacccacacagtgacacacttcctccaacagggccacacctactgcaacaaggccacacctcctcatactgccattccctttgtgggccattttctgtgaaaccatgccccccccattgtcatgctgggagtggaacccagggcctatgtgtgctaagtgagtactctactactgagccagtcaggcctcattccttcgttttgtttaaaaatggaactttattgtgcttctttttactgcacctatgctgagattggaatgatacagagtcaactagcctggcccctgtgcaaggatgccactcaaatttgctaagtgttccatattgttgtcaaataaatataaaaataaacaaatagatattaaattttaaaaagtagctgggtgtggtggtacacaccgtatatctcagcactcaaggaaaaggcaagtggatctctgtgagtttgagaccacgcaagtctacatagcacgttcgaggccagccaaggctacatatacatagtgagaccttatctcaatccctttctctcaaaatatcaatgaatagggttttgctatatagttctggctgtccttgaactcagtatcctcctgcctcagcctgtggagttggaggtgtatgccgtcattcccagccccttgtcctcagggctattaacagaaggaaacgggcttggtgattcattagggaggtggaaaagggtaactgaatttggagccaagttgggcaacactgtgaaatccataattacctcttggctacactgtgaggccttgcttggggcaggggagggcaggggtgatactaaaccttgtctagaattaagttaagatttatgcatattcttaggattcattaataaattaatttcaactaaaatctggttttaatatttagagatcatccgaatttacaacattacccattttataatgattaattactttacaaatcaaaattgtaaagataacttaatctctcccaaattatattaaaaaacagaattgtattggttcaaaggaaatattttaagagatcagtagtcagatatcggtatgatattatgtgagaggagtggagtgtgttcaagaataaagaggtgaatgatccaaaactttgcaccatttgtctgacacggtggaacagcactgtctgaggcaggaggttcaagggtagcctctactacatagcaagttcaaggccagcctggcctaccagtgaccgtgtttcaaaaacagcaacaataacaacaatagttggtctatttagagaaaatcttatttgtgtattttaaaaatggataatggtagatatcaaactgaagacatttagtactcattaggaaaaaagtcaagtatagtctcattttaaatgtcagtgttatataattcaaggagattatgtgtttcataagttaaagttaggttgaaatatttacataccagtgtataagctctgtgaagggcacacaattttaataactaatgtagagaagtcagttaaaaccaaaccagagcacagcagagatcacagtgtggtccgacatctgtgtccctatgttcccagttgggtaggcataaatgtttatctccagtttatagctggaggcagaagtggaggcagaagtggtaagtttacttaaggcaacagaccaagggaatgactgtttccaatgaggtctgagaattccctgccaaaggtgctcctgcctcaggcagccccaccccatctgaaagaaacccgaatccttggtattcgtaatggaacagggagctggccactaagatggctggaagcctatcagaaacacatcattccagattccagcctcaacccactggcccagagtctgcatctgaacaagtgtctaggtgatccgtagacacagagctggggagatcttccccagagcatgtcctggacgctgtcctggctccactctgaagacctcttagcagccttctggtgtagtcaggccaccgtcactcagtgtgtcaacacaagtaatctggtgtttccaaccttccaggctatttggtctcgacatcagaggcagagattgtggcgatgaggttgctcaatggttcaccagctacctgaagacacagccctacaggttggttcagtttgataccagcatgaaaggaaggacaacaaagaaactttacccttctgaaagttaccttcagaattatgaggtgagtgtgcagtcttccttcattctgccagtcactctgggtcctctgtgcttcctccgctgtccagagaacctcttggggacttcagtgaggaaaccctgcccctggttcgggagggtggtccagggtgcaggctatacactaggatggagagggacttgaggtgagggctgtctcaatgctggacttctggggtgcatagagggttaggtatgggagatgtgtggcgggaggagccaggggtgactcctggggagatggggactcaggaggaaactggctggaagctgagtgtggtggctcatgcttgtaatcccagcactcaggaggctaagacaggaggattactgtgaattcaaggccagcctgggctaaaggcgagactgtgtcccagacaggaaagaaagataagaagcctggttgcaagtgaaagtgaaatgttgggactaaattgtatgtccttgtatgatgcagactttgtccaggccaccttcactgcctgggtatgtgacggctatgtcataggccaggaaggcagttcctgccagggaaagctatcgtgagccagggtttaagatgcaagcacccagggattcacctccaaagccagggttatttattattattattaatgttattagtgatattattatttatttgctttgttactaatgttcctcacctaaaatagtgtcaagtatgtaccagtggccagtaggtttgagcgaatggttggcactgatgaaattattactagaatgtgctgtattagcagcagattccttcctgtgtgatcagaaaatagagcaggccgaccaataatagcccaccgatgtagtggaggtgcacacctttaattcagccattcctgcggtagaggcaggtggctctctgtgagttcaagcacagcctggtctacctaataaattccaggacatccagggctacctagtcccgttctcaaacaaatacataatttaataaaataacaagagccagcccaagctgccgccttgtctggcgtgtggatagaagccaggtttcggtgctcacaccctgtctacgagccccctcccctttccctctcctggatataaccctctcctcctgcacttgagatgttttctctctggaccctgctgggctttggtggggaggcctggcctgactgtcggtgtcctgtaacaggtagcctacccagactgcagtcctatccacttgatttctgaagcctccttagctgatctcaacaccaggctgaagaagaaggtgaagatggaatacttcaggccaaacatcatggtgtcaggctgcgaggcttttgaggaggtaaggggccactgactccgacatcgaactcaggtgtgctgtccccagagctggtgaatatgaagtgacccagattccccaaggctccttcccccagattgtctatggtctctgtggccgctaatggcctcttggcctccagggggcgctgttcacattctccagagctcaccaaactcctgtagcccgggcataaggaaaggaagacaaagaggacagcgcccccaccaccacccaggagtatgcaccaagatttcagttccaggttcccacgtagaggctatgaaggtacaggagctgcaccatggacagtgccctgtgacggcccttgcccccttgctcctttcactgcagccttaaagggacacttacatcaggcgccggtgaacacagcccccacacagttaggagctgcttggtcctgatgagaagcatcgcagatgttctgagcgcggggaggagtgggctaagctttccgagtaccggaagtaaccaggacaagtgtgtttaaatgggtgcgggttcctgagctgagtgatgacttcacgttaggctctccctcaagagagggaagtctgcagcactgcttaggaaggctccccaaatgtccagcggatgaggtgtgcggctggcattacaacccaaggcttgacacccgcctctggaactgaggcgaggatgccagtgtggaaacccgggctgttaacacccggagaagctcttgaacatcgcagctctttgctcctgtgggtggctgtgtttccctccgtgtgagcagaatgtgctgttgttggtctccatgattcgtcagggtaaatctttgcacaaagccacttcaagcctatgtccaacaatttgtcagttttaaaacagtagcaaatgcagaagatgtctattagctgatgctatcctgctgtcttagctactttcttgccactatgatgaaatgtcccttaaaggagaaggggtttgttttggcatacagttctggagggaagagagtccatcatggctcagatggcatggtggcaagagcaggaagctggctggtcacgtcacatgtaccctctggaagcagagagtggcctggaagtggacggggctgtaaatacctgggccagcccctagtgacccagcgatgcgctgcctcttaaaggtccaccaaccacaagcagtgcctccaggtggggaccaagtgttcatacccctgtgtcttgggtatgagcagtttggattcaaaccataccaactgtctatacaatttgctgttaaatttctttaactcatattttggggggcggggatgttttaagacagggttttactgtgtagctttggagcctgtagaccaggctggcctcatattcacagagatctacctgcctttgcctcccaagtgctgagactaaaggtgtgtgccaccacccggtgcttctcatatttgttaaattttaaaacttggtcatctgttatgggtaagacactgtggctcagatccctgatacagaaatgaaaagataggattctggatatgagatgtagtctaggctggccttgaacctactctgtagtccagactggccttgaatctactctgtagcccaggctggcctacatgccagaagagggcaccagatctcattatagatggctgtgagccgccatgtggttgctgggaattgaactcaggacctctagaagagtagccaatgctcttaaccactgagccatctctccagccccttatgtttttatttatttttttaatgtttagggagtttatgcttccaaatccattttctgttatatttttgaattatgatgggcttccggaaatagtaaataaaatgttcatatttttctagaaatttctatagccatgcttattcttaccaaacttcttactatgaagggatgctactgttgctgatttagtccgccttaagtgaggaagccccgtagggaaggacttgctgcactgacctgtctgtctcctgcatcatagccctttcaaatatgaatgcagaatgattaagcacagatatgttgaatcctcgtctaatgaaaaaaagtacagcaaaccttagcacgatgccaaagtccaggccattgtttattgtagatttggggcagcaggagactgcactgtggacattggagcttgtggtgcagagtaccgtggacttctccctggggagtgagaggatgccactgatttttaaaaggcttgggacggtgtggtgcctttgatttctgggacacagggatgcggttttaaaaaaacgacatcggcatctgctgcttatctctgtcactggccaccatggggctcggtgttccctggacattgctcactgtcctgagttgaacttggaaatgtttgaagggggtatcttccttatgtaagtcctcacgctacacttggaaagagctggggagaaaactgcagggaaagcacagtgtgttctcagtcatgtgggaagggctgttgctacaaacttctggagagggagtttttatatttgtttgttgggcctcagactcccgtgtagctgagaagagccttgaacttgttgcccagttctgggttccaggcatgtggtttgcgatgtgccaggagtcaaaccctggctgcacacactggccaagtactctatcaactgaggcatgtccttagtgcccagtctcatttgatccaagaagccaggcagggttagccccggtgtgcacctggatgggggaggtccccaaagccagacagttgtggtgtgaatcccagcccaccactcactgtgggtgtggccttgcccttacatgtcctgctcattccagcaagtgaaaggccacattttggcaaatcttcacttctagtcctttgtctctgatggcctaagttaggacaacttctgtgtttgcccacttggcctcaaggttttttttttttttttctttaaaatctgtatgtatttatgttatatgtatgggttttacctgtttgatgtttgtgaatcaaaggtgtgcagtgttcatggaagtcagaaagaggagtcagagccctgaaactggagttacagatggttgtgagccgtcatgtgggtgctgggaatcaaacccagttcctctgcaagagcagcggagtcatcttcccacgcattttgttttttgagacaaggtctcgtctcagctggcatcagctctttgtggttgaagatgaccatagacatctgtccttggcttctccacttcccaagtcctgggctcacaggcatgcaccaccattcctggctttgcatgtagttataggtacagattagacattgggtctacagcacgcgtaatagtggccaccgtatccaaggtctggagagatggctcaacaggtaagagccctggctgctttcacagaggactgaggtttgattcccagcactcatagggcggctcacaaccctctgtaactgcagttcctggagttgctctctttgggcttcttcgggcactgtatgtatgtggtacacagacatgcaggcaaaacgcccacacagcaaaataaatgaataaataaataagcaagtaaaattctcagtgccaagttacagaatggagcccattacacacagtatttccttctttctcctggaccatttcttttccttttcctcacatttcttccaactcacaaattcctcctcaccctgactagataactagggacctgattttgttagcgtgcccacgtgtttttcaaccagcagggggcagactaagctcatccagtggcctctggaatcttgctggataatgttatttctttgtggtgtgtatgtctagtgaatattaaacttatccattatgaatttaattttcccattatttgaaatggattgtttcctttaggaactgaagtaaccattgcatgtaaatttaagcttagtccttttcaaagcaattagtgctttcaaaccaaaatgtggacaacgatcagatgaggatgagtgactttattaacgtgaagcgattaacagtgtcaagacacagagttagcatttggaggcattaatgacaatgcttaggaagccagacaaattgctaattgcctggcagttgacttttggaacagaaggtgacctaaatctgctttcttggcctaagactctaattgaacttttcagggtttgtggctttctgttaaagccatgatgcagaagtccgcagacaagtagcttggaatgttgaactcattgtcacttggaagaaggaaattgaatacaagatggttggagaggtcttggattccccaggctgctggtggctcatataactgtggctgcagcgccctcgtgtggcgaaaggagacctgaaaccttggctgcatacagtcctgggccctttcccctccccaggcaggctctgttctgtcaccctccagtgggaggtttgccacgtgcttcccttgcagttccaatgtttgaacagggtctgtcgtaagtcacagctctatttgtctcatggtgtgacctttgcttttacaaagcttgcctagctcctgggccaattgattgcttggaacatggagtttattctcatcagaaacagttttctggtggatgacgggacacggggtatctgtggaggcctctgtactgtagctgtggtcatactggtctgagtttgaagacctacttgctactgggacaccagttgtgctatgctaaaccattcctgtaggcccaagagaggagctagtttgcctccaaatatggagtggatcatgatgccatagccagttgcagaaggagagaccagacagtgctcgtccctgtccttgctctgccttctgcagaaacctaggtccctctccggcctcgagagagtcaaaagcaccagctaagcagggatggactctcttcctggcttctctgcacaccagttagacttgggatcttcagaagcctcagccggttgaggtcagtttccaaggagcagtctcagcctgtgggtcttggcccttttgggggtcgtatatcagacatgctgtatattagatagttacattatgattcataactagcagaaatacagttatgaagtagcaatgaaataatgttatgtttgggggtcaccacaacatgaggaactgtattaaagagtcacagcaataggaaggttgagaatcactgttgtagatgctgttgtttgtttatggggcctgtattaagaccccatcctcaaaaccccccatttctccctaaagacctagacaaaggattgtcctgttaaacttagtcatcagtgtgtctcagcaggacaggcacagacctccagattgtgttccttctgagacagggccatgtgtagcctgggctggcctgtggctcaccgtgtagccaagaattgacttgagtcatggaattcctgattgttgtgctgctatctcccaaggactgggatgacaggcgtggggcatcatactaggttcccaagttactttttgttagtaagagggaccataacctttatgtatgtgcctatgagcgtgtgaatgtgtgatatgaaatatgtaggtgttcaaggcactgtaaacgggctatcccaaaacaccatagtcttgcatattgattcttttgatttgaagatgcttaaaaaggcaaatgcaggggatcatgccaatatttgagtctgtgtctcatgtagcccaggctatttgtccttaccagagactgaaagctggggctgtgggatcagcacaaacacacccagggaagctcacctttcgggggttggtcttgtgtcctctgtcttgacactctcacaactggctgctctttgtcccatgtggtgtgttagaatccaactccagctgtgtctttaggcctactccattatgaaggcatggatcatatgaaatttatattgttacgtgtgtgtgtgtgtgtgtgtgtgtgtgtgtgtgtgtttgtgtgtgtacacatatatatgcttttctctttatttctgtttcatgtcaacttattatcagactcagctgaaaagttccaagaggataggaggtattttgccttgtgtaggatgtgatccacgttatctgtgtttatgtgggtgtatgtacagccagtcctcatagattatctgaactgcagataaaacatattttgtgtctgcagatagggctcagtggttaaaagtgtgtgttgtgcaatcataaggaactgcacctgtgtagtcagcctggcatctcatgaacacctgtaactccagctctgaggattacaaagccatctcctggcctctgcatgcaaacagctgcaggcaccgctctgcccttcccccaggcacatatactcattcatacatatataaacaaatatatctttaaaaaaaaagaatgttttaaaataccgggggaaacatcagcactgaactgtccacttcctggtcattatttcctgagtgaaaccatgtacctgttacttacttttatcattgacattccatttggtatcataagcgagctaaagatgatttaaagtaggaatgtatgcatagattaagagtcagtactaggccatttcacttgaggatttgggattctgaagggggtgctggaactaatccccctgtggacggcaaaggataccgaaatgtgtacaagtgacagtgtctgtaaaccatatgcaatgttatgacacagtgtgttttatgtgtgtgcacatgtatgtgtgtttatggtgtgtgtgtgtgtgtgtgtgtgtgtgtgtgtgtgtgtgtctgtgcatgtgtttcttttttaaaaagtgacttttacttttttgtgtatgtgtgaacgtgtgtgagtctgtgggcaccatgtgtatgtattacccatgggggctggaagagggtgtcagattctctggaactggagttgtgagctttcatgtgggaagctgggaagtgaacccaggtcctctgtaaaagtggcaatcgctcttaaccactgagccatctctccagccccagtgtgtgtgttcctgtgtacatatgtgtgtaatgtttgcatatgtgttcatttaagtgtatatacacacatatatgtatgtgtgtgtacatctgtgtgtatgtgtttatgtatatgtgtttggtgtatatggacgtgtaagtgtgtatgtgtacacatatgtttgtgaatgtgtgtagatgtgtgttggtgtgtataggtatataagtgtgtgtttgtacacatagctagttgtgtgtttgtgtgtatatgtcacatatgtgggtggataaaaatgtgtggggattacaagccttgccttcacagtaaaagattttcaaacctgcttcctcctggtgtgacttaacattttatagtcttctgcctgtctgtctcttgggggaaatgggaatcacagtagtaccttccttcaagtcatgagggccaatcgaagaccagtgtttaggggtgggaaggccaggcagtcagtggccagggactgtctgtcctgtttttacactgcaccctgtgggaatgacaagtgtgggaatcttggttgaccacactcaggtgatgtctcactcagcaaggagccctcagacttgaactggcctctgaactggcctcttaacttagctcttgaactgaactgccgcttaaccagtgcttcttaaccttcctcatgctgtgacccttgaccccccatcataaaattgtctccttgctacttcacaactgtaattttactactgttacgaatcataatataaatattgtggaagacagaggttcaccaagggggttgcgacccacaggttgagagcctctgagctacaccatatgagagaataggtttgtttcagaagctgtgggcttctcgttgtgtgtctgacaagtctgctgtggacctcgggctttgaagggctgctcctgctgatttgatagagtcagtgactgagattgtgaatccagaggaagatacctgggctgggaggtagtgcagtggtcgagtgctgggctccagtgcacagtgctggggtccatgctcagtgctggaaaagattattttaaaaggtgaatcgtgtatcatgagcttgactgtgtactgcctctcttggtgctttccacagttctctgtctccccgtgtctccctccttccgctgacgtcatacctcctgcctgaccaagatgaaggaagcctgactctaaagacacttctcccttttctcctaggatacttgggatgaactcctaattggtgatgtagagatgaagaaggtgttgagctgccccaggtaaagtcgtggcttaggcatggctgctggggtgtttggcttgtggccatcatctaatcgtgggtctttgacaggtgcattttgaccacagtggacccagacactggaatcatagacaggaaggagccgctggaaaccttgaagaggtaggacaccagtgtgtccctgtgtggatgtcacctgtgcccaggaccagcaccaggtgcttatgtcctaactcccaggcacccctttgatttgtatcagtcatgtgagtttcttccccttttagatctttagttttcggacacatttttagttgtacagtattctattttgaaactttaatctctcatcaagttcgtgtgtgtgtgtgtgtgtgtgtgtgtgtgtgtgtgtgtgtgtgtgtgtgtgtgtatgcttggaggccagatgttgacactggatgatttcctcagtggcttttcactttttggtttgttttatagtagatttcttttctcatttaaaaacaagtcatttttatttaactttatgtgctttggtgtttcacctgcctctgtgtctgggtgaggttgttgaatccccaggagctggagttacagacggtttgagctaccatgtggatgctgggaactgaactcagatcctctggaagagcaacccatgctcttaaccattgagccatctctccaaccccgagattatttgtttattttgtttgtattgtgttttgcctgcatgtatgtttgtgtcaaggtgtcagctcttgagagttaacagacaattgttagctgccatgtggttgctgggaattgaacccaggacctctggaagagcagtcagtgctcttaactactgagccatctccccagcccctagatttattttcaaagggcagaactcctcgacgttccagccattgttctctgagttccctgggtgaggacaggtttccacactttatacctattcagccttcttacctgaagtgtcatgcacagttccttatggacacattaacttctctctgaaatctggaatttcaaacttaatccatattccacggccgcaatagtcttaactcgatccaaactgtctaagcccagatctttagaaactgctacatgactgagagtttcccgggccactcttagagtcccaaggcatagaacttggtccctgattccctctaatgtcaaagaagtgtgtgtcattatactgagagtaaaaaatgtgtgtccctcaggggcaccgtgccagtgccagagactggctgtgtaaacctcttcctgcaggggcacaagcggtgctgagtggctggtccagggccaacttgggagcagggacagcagcaaggaggtgaagacccacaagctgccatggctaagccaacccaggatgcacttcactttatgtgggcgataaggcctggaacttgccagtgagctccaggcatcacctgtccctggctctctgggcgaactcttcgggcttttcctggctactggagatctgtgcccccgcccttgccttgcacagtggccactttaccagccgaggtgtcacccagcccctctcatcagtttctagtaattcaagaggccccgggttctgtttcaaacattgcaaaaaaggaaaaaggacataaaaagacctttgttaacattttttggggggtggctgtgttttgcttgcccttcctctgttttgttgtttgtttctgacaggtttagaggttatctcatgaggcctttggatttgcagttctatttttgttctctgctttaaaaaatacagtgaaggtgattttcttcagctaacttggacttcatgagcagtcctatcagccagtggcatctctgccttaatttttgtttacagggaaacctccaatttttagccttaatgctggagaagttggaagcatagggagtaaatgccttgaaccacagctttgataaaaaaaaatcctgacaaaggcaatttaaggaagaaaggtttattttacctcacaattccaggctacagtgcatcattgtggggacattaaggcacgacttaaaacaaccgcatcccacccatagttaccagcagagaaatgagtgcaggcatgcttgcctgtgctcagcctgacttagatattcaggagcccctgcctagggaatgttgcctcccacggtgggctgggtaacttaagacctacccacaggccaacccagtgtagacaatctcattgagactctcaggtagttcttatataaggtgagtcaacacagtcggggaggggttgttctactttgtgctttcatgagcattttttccccgtgagttgtgagtcccaggtacctatgtaataaagtatttgtacaatacttacacaaacccacacttaacccttattaatattgtagttattattattattttggttcttttacagacagggtttctgtaactctggctgtcctggaacttgctcaaactcaaactgcctttaggaaatccctgattatctggctacttgcttacagccatccccggccacttttagaaagcttgttgttgacccgtaattacctaaggagccaacgtccaagtcctgtagaaaacattagactcctgtttcctttgggggcctgatgatgtttctgacttctttcagctaccgcctgtgtgacccctctgtgaagagtttgtaccagacgtcccccctttttgggatgtatttctcagtggaaagagttggaagcctgagagttggtgaccccgtgtatcggatggtggattaacaggcccagtggctgacatggtaaaagtttcattcccttctagagctctgttttgacagcacaaccatatttccttgttttctgatgctttaaaatttctaaaaatattttgcccattggtggtggtggcacatacttttaatgccagcacctgggaggcagaggcaggtggatctctgagttcaaggccagcctggtctacagagtgagttccaggacatccagagctacacagagaatccctgtctggaaaaaaacaaaacattactgacaacaaaaggggaataagaaatgagggcaaatgaccctctagggttaggtgtgttattttttctgtgttgggggtgggtgggtgggtattgaaagccagtgttttatcagacatctcttaaatataacttaaagaaaataatcagtgtgtcaagatgactagatcatgatgctgatgtaggaaataatattcttatactgattgcatcaggtcagctcgagccctgaatcctatagacagagctgaaccctcagttataggaatgaggagtcattggaagaccttcccttgaaggctctaaacagctccccttgcaaaacctgttaaccaacctccctgaagcagtgtgtgtgtgtgtgtgtgtgtgtgtgtgtgtgtgtgtgtgtttaagatttactgatttttattttatgtctgagtgctttccctaaatgcctgtatagacatggtatatatacagtgactgcagaggctagaatcgggcattggattccatggaactggagttacagatggttctgaactgccgtgagggctcctcagtaagagcagccagtgctcttaaagcctcagccccctattacgtactccttaaagtccctcatggctgaaacctttgattgacacttttctaattcttccgtgggattcttacatacggtgacctctctgcagccttgccacctgcccatgtgactgaccatctgtcttagttagggtttctattgctgtgaagagacaccatgaccgtagcacctcttataaaggaaaacatttaattggggctggctcacagtttcagaggtttagtccattatcatcatggggagcacgcaggcagacatggtgctggagagggagctgagggttctatatcttttttgttgttgttgttgttgttgttttgtttttcaagacagggtttctctgtagctttgaagcctggagactaggctggcctcgaactcacagagatccacctgcctctgcctcccaagtgctgggattaaaggcgtgtgccaccaatgcccggcaagggttctatatcttgatcctcaggcagtagcaggagtttgtgttctctactgggcatggcttgagcacaggagaccttaaagcccacctccacagtgaggcacttccttcagcaaggctattccagcaaagccacacctccaaatagtgcttctccctatgaggccattttcttcctaaacgccacaccatcctaaggacagagttccatagtggctcctgcagatcagttgtgacaacaactacattggggttcatcctgagctctgagtctctatggactgcaaataggaaataagggttgtcctcaccaaaacatttaatgagagttactttgctattaatttattatatcagagtgtaatataaacataaaggtacttaataaacattaggtgtgactctttcattgcccttttggactgtagcgcagctttaagggccactgtggtgtaaatacgagacaggaaatgtgggaaatgaaatcagcatcctttgactaccgttgtggggttaaaaacccagagaccatgcagcatgaccaaaggttgaatccagagtctctgttaaaccagccaggagagaaacacttctcacagagcagccacgaatgcatgttgcaaaggggttttagagacaaagaacacaaactacatgaaattgcagggagaagcaagcaagcaagcagtctgacaggagccaagaacaagcagttagctgggacatttccaccctggtgactaagcattggaatatatgagcctatggggccattcttattcagaccagcatactgggtgggtttctattgctgtgataaacaccatgatcaaaaacaacttaggaagaaaagggtttattttgcttccacttaaaagtaacacagtccattgctgaggaagtcagggaaggaactcaagcagggcaggaactgagggagaggccatgaaggagcaccggctcactcctcatagcttgctcagcctgattctctctccctctctcttagtttttgtttagttatgtttttctacacagggtctatctgtgtaacagttctggctgtcttggaactcactttgtagatcaggatggcctccaactcacagagatccttctgcctctgcttctgcctcgtgcaccaccatgcccagctaagcctatcttcttacacaacccaggaccatcacctcagagggcaccacccaaaatgggctgggcccccacacatcagccattgatcaagacaacgcaccagacatgcccacaggccagtctgttggcagcagcttctcagctgggattccctcttcccaaatgactctagcctgagtcaagttgacataaactagctagcacactgagctccacaagatctatctgaatccctctctgagggcacagccccagtgatataacacagaaacaagtgatggtgacagagaaggcttgtagattcaagatacctttattcagataaataccagccaagcgcaagccagagcgtgcccacaggtcgcaagctagcatggccagagagaagggcctttctatgtgtgtgcctggtcccttaagaattgtccctgcgtcatcctggacctcccctgaccacgccctcatgggcgtgtccaagcgtacctgtcagggctactaggaggcggggctacagtgtctccctacaccccagtgacctaataaaccctcaccaggtcccacctcgttcccatgttacatgagcctccgtagggcacggtctgaccacagcccacagcatcaggtaagaaaggccccttctcaggatcctggtgggcacccatcttcacaagcagctctttactgcaatggttgttcttgcttgtcagagttttacatcccctgcattttaacctcagtaagtaactgctttattcaagtgtgaattatttatgaccaatagtctgagtaagaaaataatagagatcttattgtgtgttcagcttccaggtcctaggagatatttttgcgagtccttactgccagccatgactgtcttcctggaaacgagcctccgtttttccttcagagcttcctgtgtcctgagttaatttgagaaaggaccagaggtggtttgggaatgtgagggcatatacattttagataatgatgtttttaaaaataaatgaaattgtgtatgcaattattctgaatggccctcccactgtcactgttttctgattactgcctttaatattgctgagtaaagaaagtttagagtcaacttaaaggctgccaaatttaaaaagatgtttatactctttataggtatattgtgtgagagaagcaggaaaacgagtcatatcctgatgtctatgtgctaacgtgctcatatgcagacatgctcacatgctgacacgctcactgctaacatgctcacatgctaacatgctcactgatggcctgttcttgatcttgatgttgaaccctgcttagttttgatttatgactgtctctgccttactgttataaagccaggattatgcttaaatatagaaatgatttcatagatcgtggggttattttgtttatagatggtgtctttatgtttctttgggattctattaagacatacaatttacctctaattgtcaattcctctaattctgcaagaaaatagaatttaaaagactagaatcttcaaaagtaggggtaagcaggagaaaccatgaacacatttttaatgttcaaatctatttttcataacaaagaaagatgaactagattgctgtaacaattaacatataaatgagttgccctcttaaacttgtgtggtttctttgtcattgataagtgtgggttccctcctacttcatctgtgacatctgcttctgcgtggctgtcactcatcttccctgggttccacacattgcctcttgccacaggtgtgtccaggcgccctgaactgcgtgaacatgactgtctaagccagtgttctcaacataggagctgcaaccccttgaggtgtcgcccgatcctttcacagggtctgtaaccccttgaggtgtcggccgatcctttcacagggtcgcagatcagataccctgaatagcagatatttacatccagttcataacagaagcaaaattacagttatgaagtagcaatgaaaataattttatggttggagggggtcaccacaacacgaggaactgtgttaaaaggttgtagactctaagacattatggcctgagttcaaccctcccctctggaggaaggcaagatgtatcttgggtacaatttggacatgacaaattttttaaagtcatactcggttgaaagtcggccactaaatcttaagccatttcccccattacacttccaaggaggaacaggaaggacgataaacacactcagctcttggtatacctcccaggcgcctttctaatgagaattcggaaccgcgcctggtccccagtggcacacgtcactgctacagcagctccaattctctgggacaaaaatccccaagagttccatctgtggtcactctgctgcactcgtgggcagggtgccacgtgtggggacatgtggcagagggagctggtgggcaggaagggtccaggcgcagcacccgccccaccccaggagactaacttcctcagccttctcagatagggtcaccagctggggacatgagagctagagagtgactttcatgttcaaccacaataaagagcaagacgaccggctagctgagcgcagtgccttcagaagtttgggtcttgtgggagtgaggtttggcagaaggtggctgggcgttgagcaagaaaaggtatttaggcggatgacaagaaactgttgcaggacagatactgagtgataggcggtttttgtatccccggtagtaggtttctccgctgatgttgtaagccaaatggaggcaaattaaaaagtgaaggactgggcttaatctgagaaaagcagaagagaaatcacgtggaaggtctagggacctgagttaacccgtaggcgtggtcttgagctttgggggaggagcctgaacttttgtcgtctttctgagggggggggggcagggtttggagagggaggagtggggctgaagcgagtttccagccaaacaccgagtaccagaggggcccaaagggagctggcagctgaggaaggagtgtcccaaaccggaagcaaaagccaatgcatgcctgctggcctcttcgttctccactcctacacagtggcctctcagggagtctacagggactccagctctgccccgcgttgcttggcctcagctgccctccataacagcctcactcttgcatctctcaggccagtgtcgcatgaacatgagttctggggactgtctcttctccactccaagatgctgtccagcagcaggacattctggtcaaggtgtgatcccgcccatcagagtctgaggtcctgagaaccctgtcagacaggttccacctcttgctggcactaggctctcagcctattccttctctcagcctgagacttaggatggggtgggaaaggagggatttccagtttcttggggtccattgtttcaatagtctgatgggcagagctagggcaaagctctttagagaaaccttcattcctgcctcacaccttcccgctgacctctcccccttggctgtaaaatccctttaatacaaagtctaatcactctgtgctgtcttcgtagagaatagctttctccctgttagaatagtctagaacaaagacttggcctttcagcaacttcacagtcaaccaggagcctggggcgcctgaggtaccttgttggccttggctttgttgtgtaaaatatgctggcatttgggaatgacaagtgtcagaagccacctcgtgggagctgcagggaaagagcctgggggcgcgcgcgcgcgcgcgcgcgcgcgtgtgtgtgtgtgtgtgcgcgcgcgcgcgcgcgcgcgctatttctggtctcaggctgagcggatagccgcgaggaggcatcaggcgtggagatgcagactttgctcagccccgcactgcctcagggtctggtcagatctctccaccttcagattccagctgctggaagctcttctgctctgctctccgcagtccccagaggggcagctgcccggcagcctgatttctaactcagaatcacaccatgtttgtgcaaacgttgtgcgtgttagatcaaataaccctacacacatcaataagctggactcctgcattgagtgggtgtgtgtgtgggggggggggtcagggtgagtgtgtgagggaaggagggagggagggagacagcgcaggaggggggtggggacaacgggtgagaaccaccacactagagccaccacctcccgcccagtccgagtgaggatactcaacttggattggccgggaagggtcaggagctaccggcccttgggctcaggcccaggccccggccaccagcggcggcgacattcgcgcttagtccggcggccacctgaggtgtatcaacacccgccgtgcccgctcccgccatgggtgcctctggctcctggggcctcgccctcctcggcctctccgcaccccgggtcccccggcagctgcggtccacctggctcggcgtcgccgcgctgggactggccgcggtggcgctggggaccgtggcctggcgtcgcacgcgttcccggcggcgcaggcggctgcagcaggtggggacggtggcgcagctctggatctacccgatcaagtcctgcaagggggtgtcggtgagcgaggccgagtgcaccgacatggggctgcgctgcggccacctgcgtgacaggtacgcgcgtcccgcgctgcgccccgctgacctaggctgtgtgggtgcggggagggggaggtcaggggggtccttccttccttcccagacaagacaccaggagctgggggacggaaagcgtgaccctcaccagccagctcgggacctggaactctgagatctccaggtttctcacttccaggagaaaattttgtgttccggacgagacatgccccacgccagccaatccacaagcagaaacttcaaactgcctcctcccgcggagccggaagggattgacccctggccgctttacttttagcgatagtctcaaacgctagagaaaacaaggaaatcgatcccagagctcatcgctactgcagccgttgagcactttcttgcagttaaaacgaaaatctgcaagtgttattttcccccacgctcttgttagataaagaaaggctccgcgccgggctgaacctgagatttgtgctgtctttagccactgggattttgtaaacagcgattataaatcaggctgaggagtgacccgtgtggacttccagacttccggaagggcacctctgcctctttgggtctggcctcccaccagctctgggcgtcactggaaggctgccttttaggatcctcagcgcctcacttccccaaagggcacagactcacgggagctgtaaccccgggctctcggctctgaaaagctaattagcctccgaccagcccagcccagcccagtggacaagctgatagactggctcagtttggagattcttgccccaaggctggtttagaggccgcctttacaaaaggtcggtgggtggctgtggactggtgggctcctcctcgtggtgtggaccttgtcctgtgtgacccgtatcaccttgtgattcgcagttctccttgtctcagggacaaagatcattagaggctggagctggctgccccaaggcctccccggctcccgctccccctccccaccccccgactcccgtaaaatacactaaacgctctctcctttcacccagacccggcagttcccgacaaagtttaaaggtgagctgcacgcctctgcttcaggcagtcgagaataactttcccctgctttgtagagtggggtctcacttgcagtagctcattgactttagtttctctcagcctccggggcaaagggcattggcattttacttccatgttgattcagaaaacacgttgacaatttcaccacagctgtggtggcaaactcttcacttttgtcacaagctcccagggaatttaagcaaaaaatacccaataataacaacaaaaatgcaaccatccagacaaacaaaaaaccagcaactgctccacgggggactgtgacaagggtcaggaaacagagaggaagggtcctagagactgtctgggatggggggagacactcagggagaatttagcaaaggaagccaacagctttccctaaaaactagaaagtggttagacggtttccaggcaagtgagttggtacaacattctagagagctgggctacaagatgggcacactctggtgtgttacaagcaggaatggaaaacgggggcttgattataaagaatgccttttgcaacactgaagcttgactgcacagcagcaagtaagaaaggaaaaccgcccaaatgtccatcaatggatgagaagattaattagaatgtggtttatgtagatggaggaatatcacgcagccttggaaagaagtgccagtgcatgctgtaacacagacgagcaatgaaaaccgaccgctgatttaaatgagcagggcagagggactgaccagctatgcatggcttcagttccagtctcttggctccaaattcatagaaagtggagtggaggccctggggttggaggaggcaggtgcggtgaattattgcttaataggggcagagtttggaaagatgaaaggttcaggaaccagaggtgaaggttgcacaacactgaatgcatttactgcacgacaggttatgttacttgtggtctgggtctgggctgggtcttgcccaggtttttggctgaatccaagtcccacacagacttgccagagaagctggtaacgttatttgaagtaaaccaatagtacagagtctagacgactatgctatcaagaatgacagaagtcaggaagatgatggtgcatgcctttaatcccagcacttgagaggcagaggtgggtggatcttcaaattcaaggctagcctggtcccagaactagttccatgacagccaaggctacacaaagaaaccctgttatcttagatgggttttctgttgctgtaaagagacactgtgaccatgacaactctgacaaaggaaagcatttaattgtagtggcttttggttcagaggtctactctattattgtcatggtgtggagcaccgcagccgggagtaaggtagtgtgcaggcaggcatggtgctggagagggaactgagagctcttacaacctgactcacagggaacaggaagtgagctgagacactgggtgtggcttgagcatatgtgagatctcaaagccctcttccacagtgacacacttccttcaataaggccactcccactccagcaaggccacacctcccaatagtgccacttcctttgggagccactgtctttcaaaccaccacacctgtctcaaaaaaaaaaaaaaaaaagccacaggaatactcaaggaccctgattattattgggggctggggatcaagagaaggaggacctggttactgagggacataatggctctctctgccttgattgatgatataataggccatatatttgcttttcctactgtacatgccccttcccataatacagttagtttcaatcacacgaatgctcaattactcacaggtaaaatggtgtcttggttatgtttttgtcaacttgacacaagtcggagagatctatgaaaaagaacctcaattgagaacatgccttcctcagattggcctctagacaagtctgtgggggcattttcttgattactaattgatggggaatgggccaggccacggcaggcagtgccacccctggtctggtggtcccaggttgtttaagaaagcaggtagagcaaactatggggatcaagccaataagtatctctactctatgaacactgctttggtttctgccccgagtcttcactcccccggcagcagaaaggggtgcactgttttttctctgaaaacagttactgcttctctgtctccagttacggatttcctaggaagtaagtacctccaagcctggggaatggtgaggtagagaagtatggtaaagatggacactagaccttcttagcaaatcgcagaattcacagcacccagtactcaaacaattagtgggcagggctggagagatggctcagcagttaagagcaattgctgttcttgcaggtggacaggttttgttgccagcacttacacagaggctggcaaccactggtaactccagttccaggttatcttatgctctctgctggcctttgcaggcactgcatgcatgtgatacacacacataaatgcccacaaacacccatatgcatacattttaaaaataaaaaaagcagtgtgtggggctggagagatggctatacacaataaagaaaatttttttttaaaaaaaaaaaagcagtgtgtggaattggcctcacctgttgttcagctgaactctgtagcttcgaactccctgaggaacagcctcatcttttggttcctgagatttcactgcttccagcgagtctctggcctactatgacgtggattcttaccatcttcttggggcatgtttaatgaacgtggtaaagtcccagcaattggggtataaagtataattaacgtctttggctcaaagtgttccctctgttacacattaattcttgagtggtgatttgcccctttaaaattaacagatagtccttgtttgctgcctaggcaatgctcagagcagacagacagacaggcacacgcatgcacgagcacacacacacccctccacaccctccaggcttcttacaggaaggaaataggaggataactgtgactctggtaatggctgaagctgtctgtgctggtttcgttttgacaatgtcaggttttggcttgtgatcaatgaagatgggaacatggtcactgcccggcaggaacctcgattggtcttgatttccctgacctgtgacaatgacaccttgaccctcagtgctgcctacacaaaggacctgctgctgcctgtcaccccacccagcacaaacccactagtccagtgcaggtgagtagaacaggactctggcctgtgggaccacagacgcatgcaactcttctttagcccttaattgtttaaattcacagcttagaaaataatagatgggtttcattatgacatttttacacacgcatattgtattttgctcatattagctccatattcccttgtcctgtactcctccattggtcccttctttcccccaaataattgtctcaatattttatatcacatatgtgtatataaggttggggactgcagctcagtggtagggtgtttacctgccacatacaagccctggatttacacaatgctgcatagtcttggcatggtggtgcacacctgtaattccaggtctgaagttcagggtcatctttgactgtatgaactcaaggccagcctgggctacatgaaaccctgtctacacagataggtggtggatatataggtaaatatttaggcaatggataattaaatctagattccacatataacagaaaacatgaggggtttgccccccactttcctttaggcctcttcctcccatgcatagcccctcttcactctcatgtctgatatacacatgtatgagtatacatgtgtgtttttaaatccaggctgtgcatatgctcttgcaattttgaggaagtgtgagcaatggagggctccagaaagcgcatcatcaagagctggccattgattacaggcgccctcgtgccctcgcctgcccccagcactcagtcctcggcatcccgagaggagaaatgaggaaccagcttcaaatgctggtgtgggggcaaggatcacaagagctcaatgtagcaggctgaggatgtgacttaatggtacagcactcgcctagcacgcttgaaacttggtttgaactctaactcaaacataaattaattaattaattaattaattaaagtttgatgcagaaaacaatggggagggctaaaacacattcatatggaataaagagaaaactaatcccatcaaagaatccgggacaaaacacagtggcagtctaagaagggtgtcctgcaagaggggaagtcctgtgatctctcacaggactgtctttgcaaagggctctggcaacagtgttccgttaggtatgatatttagctcaaagcggggaagttgcaacgtggagaagaatggctgtcactgaagaggtgccctgtgttcaggctggaggtcagagaaaggaggacattgctagggtgctccatacagaagccagcctcctcagcattgatgggcttccggaaaggcgggtgctctaggacctgacttagaaactaagaaatcacaattagaactttctttttcccattgtgggacaatgatttggcttaattacacttttgtgtaattaagagacagtgtttctcaccctggctgtcctagaacttgctttgtagaccagggtggcctcaaactcacagagatccacctgcctctgcctcctgagtgttgggattaaaagcatggaccaccgtgcttggctatttctgcattttttaaaagattttatttatttattatgtgcttccatgtgtatctgcacaccagaagagggcaccaggtctcataacggatggttgtgagccaccatgtggttgctgggaattgaactcaggacctctggaagagtagccggtgctcttaacctctgagccatctctccagcccccgtttctgcatttttaatgaacatgcaacatgagttgagcatggtggtgcacacctttgatcccagcacttgggaagcagaggcagatggattttgaggtcagaggcggagtttgaggtcatcctggcctacagaaagagttctagaacagccaaggctacacagagaaatcctgtctcaaaaaaagattaaaaaaaaattaacaacaaaagcatgaatgtagggggctggagagatggctcagtagttaagagcactgactgctcttccagaggactgagtttaattcacagcaaccacatggtggctcacaaccaaccattataagatctggtgccctcttctggtgtgcagatatgcatggaagcagaatgttgtatacataataaatacataaaaaaaagacagaccaccggcgaggcattggtggcacatgccttaaaaaaaaaaaaaaaaaaaaaaaaaaaaaaaaaaaaaagcatgaatgtccaaagaagcccatagtctatccatttcagtcagacctggtggcatcagcctgtaatcctagcaggaggcaggctgaggcaggaggagtgtaagttcaacaacagtctgggcaactcagtgggaccctgtctgaaaagaatggagatgtggctcagtggtacagtgcttacttagcatgcacaaagtcctgggttcaaatcctactactgcaataaatgtccacccctctctcttcccaccccagtgggctgggtcttcctacaacaattaatggttgagacagtctcctacatgtcaacttgaatcatgcaattcctcaatcaaggctctcttctcagagattctaggcttaggtctggggcattgaacttggcgtctcatgcttgtaccaaagcatctctccagcctgatcatgttcttctgaaaactcagagcacttcaagcctgttgtctccctgcatcctccaagcatacctttcatgtgggtagacacaggcatgcttcagtcgattttacaaatgggaaaagtcaggcttaaaccagaactttcaatctcaatttcgtttctacagtgaccttgaggcagggcggggctaaagtaaggtcctcataggtggaccaccgcagctcttctgagccatccaggaatatactgttacagtactagagcctctgaactgtccctgcctattgcgctgtccccactgcagagtgcacggtctggaggtgcagggcagggattgtggggaggcagccgctcagtggataacggacttcctgaagaagcagccctgtcgcctggtacatttcgagccccacatgcgccccaggcgttcccagctgatgaggtctcgattcgggcccaaccaccaggtcagaggcatgtgagaggctcggtgtggtctgagggtggggaaaagttgtgtgggtcttcccatgtctgcctcacctgatatgctaaatgctgtggttttcgtggcaatcttcagggctccagagattccaagcaataggcaggaagctcacatcctgggccctgactgccctcatgagtcaggcttctaaatagagggccaaaggtatgcagaactagtaagtcccgcccatcaccactagctagactccagtctcctgaaatcccgagagacaagtccctcccccggctgacaccatggtaccagcccttttcttctcctttgcctaagattgctgggaatattccagtttcttgggatccattgtgtctagtctcatagccaaagggagagccacaaatgtctcttgggaatatcctcattcctgccaggatgggtacaagagtgggattcctttttcttgatttggggggagtctccactcccctagagtatctactttcctatttgtgtaaccactagaaatacaatactatttgttctacagtggtattatttttgatcaattctgtagcggtggagtccaacttttttaactttcttacaattttgtgtcagattacaagtacaggtcagagcaggtgtgggaagcagatgtggggagcaggtgtggggagcaggtgtggggagcaggtgtgtagaggaggggtggggagcaggtgtgggagcaggtgtgggagcaggtgtggggagcaggtgtgtagaggaggtgtggggagcaggtatgggagcaggtgtgtagaggaggtgtggggagcaggtgtgtagaggaggtgtggggagcaggtgtgtagaggaggtgtggggagcaggtgtgggagcaggtgtgtggagcaggtgtggggagcaggtgtgtggagcaggtgtggggagcaggtgtgtggagcagatgtggggagcaggtgtgtggagcaggtgtgggagcaggtgtggggagcaggtgtgtagaggaggtgtggggagcaggtgtgggagcaggtgtggggagcaggtatgtggagcaggtgtggggagcaggtgtggggagcaggtgtggggagcaggtgtgtagaggaggtgtgaggagcaggtgtgggagcaggtatggggagccccagacttcacatggtcaggctggttcttcaagatgtaagactgaagtagctcatcatgatgtaaatcggtaggaccagacgactttagcgttaataaaaactggaggctgacattcatgcctcacattaatttgaaggttgcatagagataggcacatatagaattagtgaacattttctcaagtgtaatgaaaccaaatgtgaccactttattaaacactaaggaaatggatactcaggaagatgaaatgatgtgtttaagggaaaatgtccagtgacagctctaatactctgaggtcttgttctgttcataaaataaaataatattttataggttgggtgtttgtctgtgtaccaagtatgtgcattgcctatgaaggccagaagatggcatcagatctcctggaactgtagttacaactggttgtgagctgccatgtaggtgctgggaatttaactgtggttctcggcaagagcagccactgttcactgcccagccttctctccagcccctttatgtcatgcagttctgcaaggtagttaagcctttgaattgctgtgacatttctatgtaaagaactagaaaaatagtgttttttttttttttttttttttggtttttcgagacagggtttccctgtggctttggaggctgtcctggaactagctcttgtagaccaggctagtctcgaattcacagagatctgactgcctctgcctcccgagtgctgggattaaaggcgtgcaccaccaccgcctggcgaaaaatagttttaaaggtgtgtgtgtgtgtgtgtgtgtgtgtgtgtgtgtgaatgtgtgttggatatttagggactagaccaatgatgtcccctctgaggcatttctgggccacagtgtatcccatgtctgtttcctcatcaggtggcctactcggatgcaagcccattcttggtcctttctgaggcatccttggaagatctcaactccaggatagagaagagagtgaaagcgactaacttccgacccaacatcgtcatttcagggtgcagtgctcatgcagaggtagcatttggtcttcacggtctctttcttcttatcttgttgaaggtgtagtagttattacaggaggtccatcactctagtccaaacacgggaggtagaggcaggaggattggaagttcagagccagcctcagctacatgatgagttcaaggtcagcctgagccacacaagacagcatctcaatgacaacaaaagtataacagttattaatgttggattagactattgcaagaagtgagtagtttatggtctctgtactgcacagtgattctatttttaggtttgttgagcacccacctaagaagtgaaggcttgtgtgtgatagatgcacacaggtgaggcagagatgctgctcggtgaggtctgaagcttacagggacagtcctgagtctgcagcctggctgttgctttaaatttactcagcatggaccacatggtctgtgtcactcttggaacaagccaggtgcttgttgtgtcttgctgcccatcccacctgcctggttcctgcccagctgctgactctcttgaggaagatgagcatctttagcatgactgctgggttgggcgtagggcacttaccagcttgctggcatttccaagcacttccagggcccccttccttgggccctcagatgtcccacgttgtgtttcagcatattgaactatgacgctggttctagtatcctgggaggtcctggcagccaataagtctttgtaatagcctttggctattggctctgactctgtctaatctgtcgtgaagtcagacgctggtcatgacagaaccaaatgtgagaattatagtggtggcttgaatgaaatgtcctccatagtctcaggcatttgaacagtccatccctagttggtggcactatttggggaggtttaggaggtgacctgtggcattcccagtttgctctctctgcttgtactcatggttcaagatccgagcccccagctttctgcttctgctgccagggtttccatgctttgctctgccagcatagactcttcctctagagcaaaggggtccataccaggctggtgaaactcacagaaacagctggcctgaacaagggagagctcttggtccccagaatgatatctgggaaactagcatgggagtgatccagaccccctgaatgtgggtgtcagtgaggagaccttggaaatctatggggcctcttgcagtggatcagtacttatccctagcctaggaatggactttaggagcccatctcacaaggagggatactccctgagcctagacacaagggagacgccctaggccctatcctaaaggatatgacagattctatagaccccatggaagacctcacccccctggggagcagatagggtatgggatagtaaggtgttagttgggaggggggcagggaaggagagaagggagagggacctgggattgacatgtaaaataattttctttctgataagaagaaaaaaaataataataaaaagaaccagagccagagccagcatagactctattcctctggaaccagaagcccagatgtgctcttccttctctaagctgccttggtcatagtgtttcatcacagcaacagcaaagtaattaatctagtaatgaacgtgcaacaagtcagaaatgcgtagtgagtctgtgtgtctctgacaggacccatattgtgtcacgtgacttcgctgcagccatgcctgtgaaccatgacattcactttgtgttgtgccacacaacaagccaaaaaaataccttggctccaatttgagattttcatttgttaggaattgcggtggttttcttattgtgcacactaagtttctgcttttttagaaacataatggttttatgaaagaaaacacaggcagtatttgtctaccttcactcctcagcacataatctaattagaatatctttggattacattttgtcaggtgaacaccttcatttcattagcatacgtattcactttagttttcagtaaatggtaagcacactgaagagctgttttaaaatagttttttatggtttattatcaatgaatgtttgatttgtgtacctattttgtaagcctgtatacttggggatacataaaattttctcaggtgaaatgtggttatggagaggaaaacattgaagaagctgtggtgtggatgcttggtgatggaggtcagctgtgggtaccagtgaaggtgtcagcccctaacaggaactgacttctggtcataccttttgtgtatgtattgaatgggcaaggcaaaggagacaagaaagaggcccttatctctgccagtttccttggattccagggaaagacgctggccaagtgatttggtgactgagttctaaccccttgtattggggaactaattctgtcactcagcttttctatggaaggtggacaaggaatgctgggaaaagagcaatctaggaatgccattcccacaaatccaccactgatattttttaaattgtatttatgtattcattcctttatttactgtgtgtgtacacacagtgcatgtgtggaggtcagaggacaacttgtagaagttggttctctccttcagctgtgtggatcccagggattgagctcaggtcttcagacttgctggcaagtgtctttaccagtgagacatttagctagcgcccttctggtgtcttatagaaaacattccatgcatagtctcagacccaagcatgtatgtgcttatgaagaaggcagaatatcttgtgcatgagtgagctgcatgcatcctgatgcagtgactgcagtgctgtgcatgagtgaactgcatgcatcctgatgtagtatctgcagtgtctgtgcatgagtgagctgcatgcatcctgatgcagtgactgcagtgtctgtgcatgagtgagctgcatgcatcttgatgcagtggctgcagtgctgtgcatgagtgagctgcacgcatcctgatgcagtggctgcagtgctgtgcatgagtgagctgcacacatcctgatgcagtggctgcagtgtctgtgcatgagtgagctgcacgcatcctgatgcagtggctgcagtgtctgtgcatgagtgagctgcacgcatcctgatgcagtggctgcagtgctgtgcatgagtgagctgcacgcatcttgatgcagtggctgcagtgctgtgcatgagtgagctgcacgcatcctgatgcagtggctgcagtgctgtgcatgagtgagctgcacgcatcctgatgcagtggctgcagtgtctgtgcatgagtgaactgcacgcatcctgatgcagtgtctgcagtgtctgtgcatgagtgaactgcacgcatcctgatgcagtgtctgcagtgtctgtgcatgagtgaactgcacgcatcctgatgcagtggctgcagtgctgtgcatgagtgaactgcatgcatcctgatgcagtgactgcagtgctgtgcatgagagtgaggtgcatgcatcctgatgcagtgactgcagtgtctatgcaagagtgaactgcatgcatccatatacagtgtctctgcattggctgtgtctgtgttcctttgtgaaaagggaccatgcatacaggcttgtgtcaatcatcaacagcttgacagaagggcctccccctttctcagtgatctgccctgggcttcctctgaagggctgagttttgttgataaagaaggcatgtgctcccaggctgccctcaggctcttctcctacccagagtccttttcactttccaacatctgtctggacacaacactctcacaaagcttagcactgcaaatttgcttctggctcctccctctgccctgcccctcccaggcccagtcacatgcacttgcctcgtgattctcagttcctggccacctgctaggtcagactttgatacttttcatcatgtctggaccacaacgtgttctctctggaaccctagagaggcaaggcaccagctcccaggggccacgtgggagttcttacacttttaaataacatccttgctcaacagctttcaggagctcgccatctctcaaatgtccacactgagcctgtgagctggctcagctggtaaaggcccttactgcacaaacatgacaaccagtgtttgatcccagaacttgtgtaaaggtaggacatttacccctccccctcattcacacacagaggcaataataagtaagtaaataggatttaaagtcatccacatatgtaattaataagaaaatgtccttacccttctataacactcaaattactccatttcttctgtcaccactgcattcctgactttctagtttccaataaaagctctacaaaaagcaaactggacccttagcaatagataactaaatccaggccatactgggctctgtccaggcctttctggctctgagcacatcttgttttgagttattacctacaaccagtgtgtcctgatggaagactcccacggactcctctgggtcaacacctttccaggcctggtgtgaggtcagtactgagagatttctcctcttccttccctttgctaaacaaacagatgctttccagacagcagaattttttttttgccttaattttctttgttataacttttttttttggtcatactatgtaaccctggatgtcctgcaactcactatgtagaccaggatggcctcaaactcagaacgatacatccctagtgctaggatcaaagggatgcactatcacacttagcaatcttttaaataaaacgatttgtttttattatgttatggggtgtgtgtgcagttgtatatgcccgtaaatgcaggtgcccctggaggccagaagagggcatcagatccgctcgagctggcattagagtggttgtgagcttcctgatgtgggtgctgggagccgaacactggccttctgcaagagcaatgcacactcttaaccaccaagccacgtctccagcccttatgtctcaatgtcctagtagtttttattctatctaggagagggtttggaaatggttctctaagtcttaactaattaatttcctaaccagggtcctcggttctctcttttatccttttatgtgttttagtaccacagtgacccctgctggagacctgttcacagaacagactgtggttactagaaactctgtgcccagttttcttttatgacatagtcagagaaaggacctatgttaacttaaaacaaagccaaggagcctggagagctggctcagtagaaaatagcacttgctgaggtccatggttcggttccgagaacccacacagcggttcccacccatctctaactccagttccaaggcaaggcatcctataccctcttctgacccctgtggccgtcaagcacacacatggtatacttacacacatgcaggcaaaatactcataaacataaattaaaattattaagtctctctctctctatatatatatatgtatatatatatatacatatatatatattttttttctgagccaaacaacatctaagctgggcccatatagagaacagtactatcaggactaaagctataatttgggtatactctgcagccagatgctgacacctgtgccttgctttcacttcagatacttgctctcagccctcaccagctcagctccctcctttgtggcagatggtctgacctccttccatgccctttggtctcctcaatgatgacttctttctttttctttttggggttggggatgaaggatctgaggcacactaaaacagtacccccttccttttgacttcctccctggctggggtctcctctccgttctgctcacttggcaattctacaggcttttcctaagccagccttgcctggtgtgttcctccaaatccccaggatccttgtctgcacctcaaccaacacggagcaggctgtgctagaatagaatggtgttcttgaattttattatgtttttatttaacaacatgatgggtttgcccacatttaacacacctcaatcatattcatccctcttaccctcacttatttctgtgggcttttaattttaattatcacgtttatttatgtatttagtgtggtgtgtgtgtgtgtgtgtgcgcgtgcgtgcgtgcacatgcgccacagcacatgtatggaggctagaggagactccaaagagttgcttctttccctccaccaagtgagccctaagatccaactcaggctgtctagctggcagcaagcacttttgctcagtgcaccattccattttcatttttgggtttttgaaaagagaatgtccttttagtttcaatttttcatgtgtataccctgtttctcactgaatgtgagtggctggaggggcttgggccactggcttgattggcctcgagacacaggctccactagccatgcccacaggccaacgcctgagaggcaatctttgttggagttgggacactccggatgccgcaggggagatggatggacaataaggacaccaggttacacagcaatttggcatttgtgtgcaagacaggttctcacgcatcccaggctgttctcaaacttgctatgtagcaaggctggactagaactaacttctgatccccctgcctctaccttctaagtgctgtgtcacaggcgtgtgacatcatgctcagtttatacagttctgcagatccaacctcggatgtcatgccagggtaagctttcgaagaggagaggggactgacattgcttaggaagaaagggaactcaaaggtgctggtgtcccttggcttctccagacttaggtgaagacccccccccctgtaatgacatcattaggtgtgactacctgaaagtcccttcacaggtgagggcccagaggtgctcatgggaatttgttctttgctttctaggattcttggaacgagctcctcattggggaagtggcactgaaacgagtgatggcttgcaccaggtgagaccctttcctgtccccgtggggggaggggcatggtctgcctctctgctttgtcccctgtgtgatgctttctatgtgtccaggtgccttttaacaacggtggatccggacaccggtatcatggacgggaaagagcctctggaaacactgaggaggtagacctgggtagatggggtctcatcctggggtttgggtgtctggagagccatgtttatcaatgtttgtaaaagagaatggtggcaacaccacacccgtgtgcggagtgggagctttaggccactgggtggatgacatgcacagaagaaagccagtatgtcccgggttccatagtgcctgtggtttgctgttcccactggagatcttggacagtgtttccagagagtcagggggactcctctaaggatatgtcactacctaaggcaagtactgcagaggagcaggctctgggacagagatgaggataccctgtagctcttgtttgtatccattcaacattagagcaatggagaatctagtctttattttccatggaaccaaggagatacagcaaggagaaagacagcctgggcagtggaaaaagacctggccatggcaatattgtgactatcagcaaacttccttccaccaggccctgactgttctgttttaggagttagggattggatctagtccatgtgaatgctaggcagactcttctaccacagagctctgtctccagccatctttttaacttgttaattttttttttgagacagggtttctctgtgtagctttggagcctatcctggcactccttctggagaccaggctggcctcgaactcacagagatccgcctgcctctgcctcccgagtactggtattaaaggcgtgcaccaccaacgcccggcttaacttactaaattttattattattattactattattatttttatgtgtatgggtatttgcctataacaataagtctttctgccaagccacctgagtcctgctgccacgtgggcgctttctgccaggccacccaagttccacccgccgccatgttaaggccccaaataatacacagagatttatatttgtttcaaatgctgcttggccaatgactaggattctcatctgctagctcagtcttaattgtcataaatctatatattttatgagacttatcttatcagacaccagtagcaagtgttctatcttcccagactcacatggtgactgcgctttctcctacctttcccagaatcctccttgactcctagtcccacctaccttgttttcctattggccaacagtactttatttatcaaccaataagacaatcatatacacagaaggacctcccccatcatttacctacatgtatttgtatgcagcatgcttgtgtatgatgctcacacagggcagaagaggatgtcagaccccctggaacacgtaacagacagttgtgagtcaccatgtgggtgctgggaactgaaccagggcggctctgcaagagcagcaagcaagtgctcttaagcagctcttactttttagtttgaggcagggtctcaccaagtcatccaggttggctttgagctcactttgtagtctctgtaacccttggatttgcggttctcctgtctcggtctcccgggtagcttggatcactaggcatggttttggccctcacagaaaaaaagatacgatggaaaactagaaaagtctctgtgggtcagactcgggagctggttgtcacctctatatttctctctctctctctctctctctctctctctctctctctctctctctctctctctctctctctctctctctctctctctctctctctctctctctctctctctctctctctctcctctctttctggttcctttccctctggctttgaaaggttctcatgcttgcagaatcaactcctcgctggggctgctttttggcattgttagagcccgtctcttgggaggctatgtttgtagaaagagagtaatgggccccaaacacagagtaagggcaggaagcagggatcacaggagaccatactcaccccctgatcttctgcaggcctcttatagcccagccatcctgccctaattgcttttaatacccagggagacggcgcaggcggccgaggtgtcttctatctctccctgagatttaaagtgccgtgggtatagtgatttacgttcttctcaggacaggtggtcataaatccggcagggagaggctccgcagcaggttataaatcttacaggcggagcacgcagccccttcaacggcatctctgggtatcgctggtgcccaggggttggcgctgctttgcactgaatatgctgggcagggaggctgacctctcgcccacctgcccggccttgcaggctccttacagcccggccatattctctaattgcttttatatggtcagagcccagctgagcaaagcgagatgcctaccacagagaattattccagcattgtctggtaggctaagcacggggaggctggccatttgcttaagggaaaggaggagaatggaatctctgctctaaaggactggctgaagcggctcttttttttttttttttttttttttttttttttttttgcactggggctggaacacaagatcttgtacacaatgggcaaacactctgtcccagagctccatcttagcatgcttaggatcttgaggtctcggtttctttatttttaacaactaaatttacagaacttcacataaactaaaataaagcaacttgtattatttccattaggtgatgaggtcctgaccctgggtcccttggcatcttgctgtatttatcaatttgacatttttgagagcaggacagccagaagaactttcattcctgaggctagctgctttcaatgacacctaacctaaccctgtcggccaccaggggtggtaacagtgtccatatgacacccctctgggagttgtcacaatgacgcttacctccagccatggggatagtccatgaagtctcagaaatggaatgaacccaggactgcccatggctttgtgatctccatgtggggactggtcagagaccttgccagtagccatgcctggtgtgagtaaattagacagtatgaacaagacactgtgcacagcactttaaagaaggcaaaatatttctgttcacactgccatgtaaggatggagacgtctaactggaggagaaggagttgtttgaattttttttttttgagtgctgggatggagcccagagctaagcatgttatacaagaactgcatgcaccactgagctacaatttccagttctcagagacctctgtttaggctaaaaaaaaaatgtcttagggcctcttgcttatcagagtaattgcatcttctatctgcattgaaatgaaatacatggagaaatgttctttgaaatatagtttattgctcggtatggtcgctgacattagtagtctcagtactttggaggttgaggcagaagtattgccacaattttgaggctaacctggtttacatagtcccaggtaggtcattctgaactataaagaaaggtcttatctctaagtgtaatttgttaattctaagaggttgcatatgtatttatatagagagggataaagatatagatataaatatacagagatatagatatacagacagatgtagatatatagttgtcagagacgatccattcatcaggaaagactgatggaaaaggcttggtatacacctcttgcaatacctagttatgtccaccaggggccactgttgacctcacttgctcaccaggcaatgaggagttgttcaggttagaggtaaatgagtgattagttggaatctctggattcttagaaggcctgaggaggagggttgcttaggaaaatgtaaatatgaggagtggcagcatccttactggaagatgagataactttgaactcctgatcctctggctgggctttggtaccagacaagcatttggatacaggatcctgggtacataggttttgcctctgagactcacctggatagcaagggcatcacacattcctattaaggctttgcaataagagttgaagttatgtgggaaatgcttggtgcatatgccagtttgtgagaagtcggggaactccctgagataggaagacccacagcccacagcgcagagcctagaaatatgataggccaaaccacataaatgattgctttctcctccctcacccatcccccaaaaccccttcatcatatggtgaccaagggagaggcctggattcatggcccaaggctattgcaggctatgtcatgaggaaacatgctaggcaagctgagatagcccagaataacagctttttccacccacccatccatcatccacccagcacactatggctgtagtgtcaggccctgtagcaggactcagagctacagtagcaaacaggaagacacactgttatcccacaagctgaggaggggttgggggctccagaggagacagactcagctttcgtaccttcattagctattcttcttagtttattccctgacagtttcacacatttatataatacattctggtgcagtagctcagggggttgaatgttaacctagcacaccacagacctacatttggtcccatagcagctcctaagctggggcaatgttacccaggcctgttgtcacagcatgagagaagcatgagttccacgtcctcccagcctcaggcagctcctgacccacctggaccataggagaccttgcctcagatctacttcctcaacagaaaatttagatctctgttggcaatgttagcacacaccagaaagatacgctcaagaggctgaggaaggagggccaggagatcaaggctggcctaggttgcacctcttgtctatgatcataccacccaaacatgtgggaccttgtctgtgtctctgttctcggcagccatttctgttttgacgagtagttggaaccatgtatgtacaatttgttgttttaaagatgaaatggaacgaagtcaatactgtcaataatactgttttaaacatgagtgtatagaattggagttaacttaagtgagacacagaggcaagctcccctggcagagaggtgctggagggggtggggtcttagcatgatacttccacattggctcatggcttcttgagttttgtgcctgacaaaggtgcatatcctacttacccacccccaaggtcttgatacataacaggttgaccttgaacttgctatcctccttctgcctcagtgctagaagaccacatctaactcatactgtcttttttttaaagattttatttatttattatgtatacaacattctgcttccatgtatatctgcacaccagaagagggcaccagatctcataatggatggttgagagccaccatgtggttgctgggaattggactcaggacctctggaagagcagccgatgcttttaacctctgagctatctctccagccccgctcatgctgtctttaagagtgtcaccaatacgcttgtccattcaacaagcaatgtgggccaggggtgactaacaaggcccagacctggatagaactgggacaagggaattgggcacacattgagttccccagggtcactctgtcccatagaacagacagatgtgtgacctggacctacaggacaaaacgtggcaagagcagagaaatcaagaaacaggaaattgctgttggctcatgggactgtgggcttcttccctgcaacaggtgacattcgagctgggcctggagaaaagagtggagttctgttgcctggggaggggaaggagggatagttactgggagttgccaagcctggtagagcacagtgctctggtagagcactgcagtgttgcatgggtgtgttaagtagcaggagaaaaagatttgagaaacctggccatggccccgtcaggaggctttggacaccatgcagggagctgcagtgttatttgttacacagtggggaccggaaagggtttcctagtcaaagaatggtaaaatgggtatgaaattaagacagcatggggctggagagatttctcagtgattaaaagcactagctgctcttccagaggacctgggttcaattcccaacacccattttgggcactgttaacactggtaactccagcttcaggagccaccgtgcttttctggattcctcagtcactgcacacatgtgatggtcacacaaacacgcagagaaacactcatacacctaaataaaagtgaataaatctctttttcagaaagacagtcatggggctagagaaatggctcaggggttaagagtaccaactgctcttccagaggacccatgttcaattcccagcacccacatggcagctcacagctgtctgtaactcagctctgtctatgtgataccctcccataggcatacatgcaggcgaaacaccaatgcacataacaataaataaatctttgacaaaaatatagtcatggaatagtgtccacactgagttggtgtgtgggaatgagaaatgaagagggtttgctaaaacttagtacactcaacatctaaggtagcatggacatgtcggcagcaatgtcagaacaatggcagggagaaaaagggagcagagtcagatggtaccctccaaggacctctgatctgggcaactgatgggggaagtgcttctgtgtatgtgtttgtcttattggatgacagataaagtactgtttggccaatgaggcagcaagttaggcaggactaggagtcaaggaggattctgggaaatgtagtaaataagtgttgtgatccaggcaggaagtgacataacagggagactcatatataagctaggtcaagaaggaagtcgttccttttctttcttcctcctggtctctgctctggagttgccatgtgatccgccggcaagagagggcgccagcagaaggcatcctcgataagataagtcttataaaatatataaatttatgataattaagactgaactaacagatgggaaatcctagtcattggccaagcagcattgtacctaatgtaagtctctgtgtgttacttgggaccttaacgtagcagtgggtggatggagtgaagacatattgtcacaggcaaccagggatgaggaaggtcagatgtaaaggaaggggtggcagtctgaccaggactttggatcaggtgacatacgtgggaggagcttcaaggaaaaagaaaaattataggcatgtccaggcatgtggagtatctaatttctcttttaaaaaaattgtaaatcctgggggctggagagatggttcagaggttaagagcactggctgttcttccagaggtcctgagttcaattcccagcaaccacatggccctataatgggatctgacaccctcttctgtcatgcaggtgtacacgtaggcagaacaccatgtacataataaataaaaacataaataaatctttttaaaatgtaaatctttctttaaactttaagctcatttatttatttatttatttatttatttatttatttatttgatgtgtatgagtgtttttcctgcttgtatgtctgtgtgccatgtgtgtgcagcactggcggagtcagaggaagtaatgaggtcacatagagctggtgtgatccagctgttacaggcagttgcgagcctcctggtatgggggtgcgaggaacccaaccttggtactctggaagagcagccagtgctcttaaccaccaagccatctctccagccccaaatgcctaatttcttgatgctggcaaaggaaatgtcactacagtgaaagccatgaccatacagcttttaggccatgcctcggtagcctatcactctctggctctccccaggggatgctggactgttagatctgcctggttctaggcacagcctgcctgtgtggggtggaacctgcctcagccctgacaaagccacatggggtctaagttcttcctgttccccgtgactcaccaaggtcttttcctgttgcagttaccgcctgtgtgacccttcggaacaatcagtatatggaaagctacccctctttggacagtattttactctggaaagttcagggacagtcaaagtgggagaccctgtgtaccttctgagccagtaatgggaactgcatgttctggaccagcagctgtttcttagaaacatcttggatgctgatatcactggaaatggttcttcgcctcttctttgggtctgtgatttccaagttttcctctttcagatttctttctgtctcggtgtttcctgggtccagcacacaaagcagaggaatccagttttgcaagcttagcaggactctgtcaagttccttgaaggatgaagggattatcagaatgctctgtttataattacctagtaatttttctacttctgcattcgctggccaaggcaacagatgtccatcatctccttcttttgggaaaggaaagaaaacaggaggaagactctgtaagccagaagaatgttccagaatgttttgctacccttggacatcatgcatacaatggaaattaaatactttcccaagtaaggttgtaatgacaacattttacttttctcctcaagcctggggctagcttactagagagtaagtactggagatattaatttgtccgtagatcttcctgagtctggcattgttgctccctagacagtgtctgtgaagacttaacttaaggaacacctctgaaatgtcagggcacaaaaccagctctctagaatgttcaggctggctcccagcttagtgaaaagcaaagtgattttcttcccttgaagcaaagtgttgacacatcctattaaaggttcaaaaatctttaatagcacatggggcaaacagtgacttcagagagggagagacctacctctccctggttgtctaagaggagatttgatattggctctcaataggaacaaaatgaaatggccccgagaggatgtggtgccatctagtggtggtaatcggcagctcagcccaacttgagttaaaaaaaaaaattcaaccttttgcctgagtctagtgttctgtagtagaaacatttctgtccgaaggaagtggaggaggccctaggtgtcctgtgtttctctccttcagggcagtgactttcttttttattttaccttattttagatgtatatattagtatattaaatatacaagtgtatgtgtgaggatgcacacaggtgccatgacacacaagtggaggtcagaggacaacttgaaacagttctctccttctaccataggagaccttgggattcaactcggcagccacctcactggccctagatccgtatttctaacatcttgtaacaatggcatccatcccctgcccctaccgtggctcatcacttcaggtgaaccccctcattgtctctggacagaaccttgtatgaggtagccagagctagcacagcagagaaacccccaaatggaagaaggtacccagacacccttctcagttaacacttgccttcttctgcccattggatgaagggttctgcttgaagacagagaacccaatgacctcaggaagctctgagcagctctcagacccactgccagcaagatttaaaggctattcacatgtgtttattttataattaatgagtgggttagtactaaaggcaaagctgatgtcccatttgttttggatactgatcacattcacttgaaatataggaccaggactatcacaaaccttcagaaagggctcacaactgccagtgatggacatgtgaggtcaggcccaacaagctgcctgtggccattctatgcatggcaacttcatggtgcaaccatggcaaacaagtgaaacccagggctgccgagcaggaatggggctatggcatgtctctggtgggcaaccttgaaggctggctgtcttggcattccagaaagagccagaaacttgccagcaggaaagaaagtagccactttgtgcacaagaacagaaagaaaactgggcggaactgggtgtggtggtgtgaacccataatcctatgcctcgaaggaccgagccaggggctcaccaagagttcaagactgtgttgattggggtacatagtgagtctgaggcctatcctagttttgtttatatggctgtgatgaaatgccacggcctaaagcatcttggaggagaagagggttatttagctcacagttccaggttactgtctgctatgtggagaagtcaaggctacaggtacttgaaggagcttgttgcacccaagatcaagagcaaggggaaaaacgaatgcacacacactcctttgcttgtgctcagctccatttcttcacttgtacaattcaggattccccctcactagggaatggtggtgctcacagtgggcggggtcttcctacgttggttaagacaatctcccatagatgtgtctacaggcaaaaccagtatagaccatgcctcactgagactcttcctagatgtttctaggttgtgtcaagttcacaaaactaaccatcacatgcccagtctgggtcatgtgaccaggccccgacctccattttcatgtgtgtatgtctgtgtgtcaaagtgccggaggtcgatgtcagttgtcccctatatgcccctccactgttaatctgaggctcgtcatttttaatttgctggaaggccagtgagtccctcagagcactggtgtccattccccctccccctgactggagttacagatgcacctggcttctcaatgtgttactaaacatctgaacttagatcctatgtgccctaccccaaacccgagggtttctgttgagtgcgcatggctttctcaccatcatcaaatcaacaagtgtgaatttggactgatgtaagttagggatcacttggatttgagttccttgaaagtggctgagtggctttcagatatgaccttgacaggacatctaactggagtgttgttggttgcacacccctgtgctgcattttccagagtggaaacctgagtttgtggtggtggaggggggaagggtgcactcttaaaacagaatgccgtgggacaatacgtttgagagtcctagcatgcctcagttcttcaaagacagaacagcccatctgaaggctttgggaaggcctttgtaaacatgcgcttgtgtttcatttggccctttaagaaatgtcattccggtatctagggaaagttgtggcagagctcaggagttccattcaacatgcatggtgcattcatgggaaacctggagaagacaaagtgaccccactgctaggtcctctgctgccctggcctcatgacaacacccagtggtggaagtgcccaaggatgccctctctccatccattaacttcatctttataccaggccttcttaactcattcatctgtctatctatctatctatctatctatctatctatctatctatcatctatctatcatctatatctatcatctatctatcatatctatctatctatctatctatctatctatctatctatctatctatcatctctctgtctatctatcatctatctacctagcatcatctatctatctatctatctatctatctatctatctatctatctatctatctatctctatctatgtatcatctatctatcatctatatctatcatctatctatctatctatctatctatctttctttctatcctatctatctatctatctatctatcatctctctgtctatctatcatctatctacctagcatcatctatctatctatctatctatctatctatctatctatctatctatctgcatgttttggaaacagggtctagctacatatcccaggatgaccttaaactcatattcctcctgcttgagactttccagtgttgggctgagagatgttcacggccacaccctgttctatatgcattttgaactgtgctcatgttagcaagaagccacagttcacttgtgctactttcttagatatggtccagtgaattgtgacggctttattatgacagatttatttatttgtttgtttgttttttgaagtagaagctcatgtagtccagactggcctcaaacttgttacatagccaaggatgactgaacttctgaccctcttggcacccacttccgagtgctgggattccaggcatgcactgccacacctagtgctaaggatcaagcccagctcttcatgcatgctgggcaagcactctaccaagcacactatgtttgccagcctcacgttctgactacattgtaaattgcttcatttcaaacaagagggaaaaaaggtctctcagtaccgccaagttcttggaatttatccaatagaaaatgtgcccgttgtcccctcctcccccatgtgaccatgccctcctaggaagtgagctacaacagctttggctacaacccagacacaactctggccagaccagtggcaccatcagcgaccacactgccccagcctagagacaggagtaacccttgttcacagcattagtcttcctgggcagcctggggtcctgtttcccatccaccttctcctggggccattttggatgggtaggtcaatttggctattgaccgatctaaagcattcacccttggtggtccccagtcatgttcctttaccttcacagagcgttctaactggaactcactgcctgccagtctttgccttcgtgctcttctcttttgctctccatgcatccctgacctgggtcctcaatagtccatcccccattgagcctaatgggttcctggtcaagcctaccttccctcaccctctttaggatttttctaagagtcctgtatataaagtattgtcataattatccctgattaatatttttgcacctaataaagtctcagggcctgggctggggaggctcaccttccagatggcttctccagcaattaaagtgacttgttagttggaggcccgggatggctgaggacagctggagagctgtcctttgcaagcagctctggttaacatcaaccaggaaagctctctgtaaacacatgaataattgattgtgcagtgctcacatagctactgcggatctgagcccggatgactcatttgcgagccatccctgtcgtctggatgccataacattggaggaatgatgacggtttcttggaggttcttctgtggccggcgtagccaagacgaagactgtaatggtttgttatgatgacctttgctattccattaggctcaattgctttaaaaaatgatgtgagcgcactttaggaacgtttttaccctttacgttgacctgacatcatagtttatattagcaaatgtattaatgacagaggagtgttttcatgtcccaaggacaagttttaacaaccataatctgccctcagtcatcataaatataaatgtattggtcaaacagacctcgttaatgtggccaagataaatgcaagtctatattttaaggcagtggaagccctagagaatatgtggggctttttgtgggccttcgagattctgtatatgtgttatctgcaggctgagaaaattaacatgtttcccccctctggtcctgtatcagacagatacaaatgtcttaaggatgtcaagtgagattgttcacatagtttctggacaccgttaatgcctggtggggtgaatcttagttcttaaggctgtcttcttactctgctcacagggcttttagagaaaaagagaagatcccaagtcctggcaacgtgctacccaactgacatgtccctgaattatattgtgccccagctttttaattatatcacccccccctctactctccaggatcttcttgcagtgagacaggactttcctgtggttgtgtgcctcacactggctggtaagctatatgtcagcagacagtgttccgtgtgtcatctttagacaggatagaagggacactctgcttttctctttgctacaacatactctcaagcgatggactttattagcagtgtctggtaatagctgcctaggtcgacaataaatagctttttaatagtatgttgttttgagctgtgaaaaaaaaatgcaaggatgtctcaaggccttttgcagaaaagaccgattttagggtgagtctgtctctgcctggtatgatcaactcggtgccttcattaacttctctgtgggttgtggtcacttaatgacgagtgatggatgaactcttcagtgaaaggccttggctcttgaatcttccccgactgaatctgaatttctttttaacagcaccaagcactgagctataggatttgatcttgtctggataagttctctgggacaagggcctagactattttctaaacttgtgctataataatctcttttaagcagttgatggtttagaaactgaggcatacacagtattttcaagcagagtttttcataatacatgagagacagagaaaactcaagtgtccccggacaagccaaattaggcactcagtgggatgttattcagccttaagttttagcaaccccctggcatgtgttcaatgtagatgaaatgaaagcagtcacacagcataaatatcacacagttccactcctgtgggtatctagtagtcaaacttagaaacagagagaaggaaagcttcgagggcagagagagcaggggttggtggctctggtgctgctgtctaacgggttcagggctccagtcttacaagttagaggagatgcagtgagtcattgtccagaaatgaggagtgcttccctttgcaagcttgatgctctgtacgctttgctgagacttagacatgatacacagaagagggggttggggatttagctcagtggtagagcgcttgcctagcaagcgaaagaccctgggttcgctcttcagctccaagaaagaaagaaagaaaaaagacaaaacaaaaaaaagaccaaaaaaaccaaaaccaaaaacaaaaacaaaaaaccacaaggtattgaagaaggggggggggtcatcaagccctgacaggtttagaggtgaattcaaactttaaggctctcctggaaaggcactgtaggctcgggccctgggaagaaccccaccctctctgggcctatgaagaagtcttctcccagagactaaatcaaataaaattgagacttagtttctttgatggatgcccccactagagtgaggcaattatggaaaggccttcagctctctcctctgaactggggtcacaaggacgtgagtctccttggcgctgatgttggtagagtttacattcaggtctagagtgacattatcttttcttttttggaattttattgccgggccacgtttatgataccacatgattttcttgttcaaccctggtaggctgctctggtcaatgtggatggagatcatttgaggtgggagtcagaagagggaagacagttctccatgacaggagggccttgagccatgctgtgcagtgctaatccatgtgagggcctcacagggcaggagcctacctagaggagcttatcttggagacgagatcagggttgattccctctgaggatctcacctgtgttcagttaatcatatgcatcatggattcaaagaatacagagatcagagtgggacgctcggcttgcctctccccccgaaacccagcccaatacattccagttgtatcttgtgtttgtagggggacccaaagtctaaagagtgacactctagtgagtgacggaggaagggtgcaggtctctgagcagttgttaagagttgtgaggtgtgtgtgtgtgtgtgtgtgtgtgtgtgtgtcctccccactgcctccatgcatgcctgtggcactaggcactagattagagactgttaaaaaacctgcccatgttatatatgagaggctagaatcagaactcaaggcattggcttctggaaacacatggctatcccttcaaagagtgaaagtgttgtccattggagacaagccccccccatcctggccccattcttgtttttaaatatttgcttgcaatttaatgatagacaccagagcttggtgcagtaagtgtcacgtgtgtttggatcgcccggaactcttgtttaaagtggttattcatgtgtatgactctaagctggtcccagctggtgggtctgcggaatccccggaccccaaacttgttaaactctcaccccttttctgtacaccaagttccaaccctcctctgctgaactgacattaatgtcaacatcctccataaaagagaaattagccagagtgatacatccttgctctctgtggaaaatggagggatgtgtccgttttgggtgatgagttaactgggattcaaatacctcccacagcccccacttgagatgccccggagccccatctgtgtcctcagagatgggaaacacggcaatactctagaggcaggtgacaggcctctcaccaagtttccacccacagtagggaaccctgggtggaatgaatgaatgaaccctaatcattaaggcttggggcttaactagcgtgtacaacttgtgtgatgtgtgcctgtgtgtgtgtgtgtgtgtgtgtgtgtatgtgtgcgcgcgcgtgcacgtttggtgtgagagaatgaacaggacaaggcactttcacaagaacatttgcttaggaaaatgagccgctacctttttgatgagtcagtgaacagagtgcagttcagaatccatcttggacaatttcatgagcacgagggtcagcagtgggccttgctatttttcattttttacgttcctttctgtaagacaaagccaggatcaggaatgctgctgaaggctggcacattccctgcaggcctgggagggagggagtgtggggagagtcttggctttcctccccttgcctctgccatgcttcgcagaaactgggaaagaccagagctctaaaatcttaaatccttctagaaaataacctgtctctcaggaatctgaggtcctagagaataataagcagccttcccctctctctccccctccccctcccaggcggggtgtgactggactgtgctattgactgtgattacttaagttcgaataatagaaggatgtaataaatctgcagctatctgccgtgtttgtgatgggggcagagctgcatggtaagaagtcagttgctgcgacagacacaaagcagcactttttcctccaaatggggcaactgagcatctaaaaaaatgtttctgccttaatgatactctggtttctgctagattttcttctttctgaacacatatactgagtaacactgctttgttcagatcctgatctgaacagccaggctgagtgtgtgtgtgtgtgtgtgtgtgtgtgtgtgtgtgtgtgtgtgtgtgtacaaatgaacacatgggtgtgtgcacagtgagtgtggatgtcagcctccagtgtcatccttagctgctctccatatttttttaaattgtgtctgtggaggccagagttcactatctctctctgtgtgtctctctgtctctctgtctctctgtctctctgtctctctgtctctctgtctctctgtctctctctctctctctctctctctctcaaacacacacacacacacacacacactccccagctgcagctggacctccaggtctttgtcagctgctctataaagtagggcctgggaatggaagattcctctgcaagagcagtatgtgctctttgtactgaattagctctccttgctttctgagacaattatgtctcactggcctggggctcaccagttctgctagtcaggctagcctgtgagcccccaggatcaccctcctttacctccccaggctgagcttctttaagtcaatactgaggatccacatccaggtctaaatgctccaatggtagacgaggcctttatctgctgagccccgcccatactccccctcccctcccccaccctcactcccacccactggctctgcattcagatttcaaatctaggctcaagagttcctgagagaagaagctctacatctaaatattctgtgcttggtcttcagccggtggtgcttttggacacagtgaagtcacttgtctgggtgagcagccacgctgcacttcagttttacagcacaaaatggatgcacaggaggactagagcaacacaactcacacacggagtgctgacatgattatagatctctgtgttgctgttcatgcgtcatttttatacgaatagtttcctaggatgcttgctttttgaaatgggctctcgtgtccaggctggtcttgaactcactatgtagtctctccactcctgaacttcctgcctctacctccttcctgagtgctgggattacaagaatgtgctaccaagccccacttatgtggtgctgagtctcaaatccaggtctttgtgcgtgctaagtgtgtgtgtgtgtgtgcgtgcgtgcgtgcgtgcgtgcgtgtgtgtgtgtgtgtgtgtgtgtgtgtgtgtgtgtgtgtgtgtgggcactcgtgatcgcacatgcgtggtcacacaccctagtacaggcactcaccacggtcagtggcagccatcaggagttgattccctcctactgtgagtcctgggttttgactacatgttattaggccttcatgacaagcacattcatctaagcgatgattcagaatactgatggcattctgcacactgttcagagccatgaagcccagctccatagtccccggccacttgaaatgcagctggttcaaacagacgagctgtcgatataaactatacagcagatatcaaaggcttcttagcgacggagtgcaaaagatcgctgtaattatttttatttctatcacatgttgaaatgtcataacttgcatgtgtggaattagaataagttattagaatttatttaatctattcattgaggttaatgtttatccttctaatgcggcggttacttttccagctgcatttgtaagagctatggatgaaggcttagcatgcccccccaacacacacacaaggacagagggccctctagcctgtttgattctcctgttggaaaggccaggtcacctcacctcaccttggctttgaggatggaattgcccaggcagtgagcacaggacttccttggggttggtggaggtctggaactaaacaatgctattcgtttatatagtattatgactgtattaagtgtccctgatagtaattttaaaagcttacagattcattcattcatcgtgtgtgtggtgtgtaattatttgtgaccacaggcaccttttgagagtaggttctctccttctaccatagggattccagggactgaatttaggttctcaggcttggcaacaggctccttcccctgctgcgccatttccatggccccttgtgaatttcttaaagccatttcttaccaccacaattgacacgtgccacactgtgcttctgtttgtggattcttgtttaaaagggaagagggtatgattgcccacaaacacagtgtctccataaacgggggaaatggctatgtgttgggctgaagaggatggcaggggtttgaactctttctcctccctcatgagaaatgctaacaggtgtcccccaccctaccccacccctgctccactgcgcattgctggaggccctgcctctctctcctagctagctccttcatttcttcatctcatttcacctgtgcacgtggcagtctgcccactcctcacagtgtctgtggtgttaaggagtccgtggtcttggcaattaaaaccaagagtcaggcttaaggcgcttggcctcctggtactgaagagtaaaggaagctggtctttcattccccaggtctctggagttctgcttcttaaggtaacctccagaaggcaaaactgatgtgtgtgttaggacagttaccctgggtagggggggagggcgcggtggtgggggtggctgtttgaaggtgggaaagggcttagctgagcctgtccatctggggcagtgttttgagcgtgtgaaggtgtatgaatgcatgttacacagcaattagaagttaaacaccttgcctgtgagtacattttaaaaaaaaattttagtgaaaaaccctggtgttaaggacatgagacaaacggccacaagggggcgctgtatccctttcctgtgagctagaggctctccccaaggttgctggagatggagaccagcaatcctcagggcagagatttgtgggtgagtgacccaccttggacaagcctcctgagtaacttatgtctgcacttgagacatccacacacagagagacacagacaaagtcgactttttctttttaagccttgattcagagcgccggctgtggagggatgggatgggagcgaggggttgctccttgcgagcagctcacttggtggtcctgtgcaggttagacacctaaggaatgtcacattcttgggagaaattaagattcctgccttgctgtaaataaacacccacgaggagatggggcagttctggaatgaccaggccctgctgttatcgacggaaatcctgtgtggtggtaaatatggccctcggaagagcctggagaagagattacgggagcagaggggctgagaggcaaatgtgggaggttattggccagagagtggtcaggaaaccagaaactgggggcgggatgggggtgggggtgggtgggctaaagagcaaaagaggaaatgagggaggaagaataaataaatgagataagcggcttcctaacttcctcccttgttgcccttctgttttgcatccaggactctggtctttctgagtcctcttctgggtacaattgccccagaagaggactaactttgagaagcaggcctagctcctacctctctaatccatccccaacctaccagcctactgtaaaagacttctatatgtctagtcagccactgggcatgcctggctgagcagcctggggggggcagggtctctccaggctcaggctgtgcctctactctccaggaactaacaccaggctgtttgcctggctgctctttccaaacatgcacacatgactaaatgttggggttcagtagggtttaataacagtgttggggtagggatatgactcgggtagaacttggcatgatcaaggctctgggttccgcgtccagcaccgaaaccacagaataaatggataacaaaaatcaatgttgccatgcggagagcttcccctgtcttggaaggaaacgggaaatgatggggagctccgcactgatgtgctagccgggcccaactgtctgcaggaaaacatcctgagttctaccagcaacataccagattccgctggaaaaccgatggctctctgaggcaagtgaaggagactggaaggtggcaggcagggcagcctggccgtgccccagctctgactgtgtctcctaatctttgtgggtccctgtgggcatccctaaaaccactgagacggtcaaacctccctgcaatgttgcaggaatctaacagccaaatatacgggaagcactctagagtgtgcagagcacttaaatgtttgttatttgtcagggaccactagcccacatatggcaggatgtatagggatgtgtccccaccccaaactgaaagaactcaagtttttgaatagttgtctttgactttggagaatcacagagaattgttactctgctaaaatcaatcatctaagcacggccaagggcccaatgctacaggctcatcctggaggggaatcaggcaccagaaatccaaaccaccaaagctgggcacttgtccttgaattgtgattctgggactccaatctgagtactctcttttccatttatgggacatttctgtacttctcagccatgcatcccggggaatgatgggataatacaccagactcatttctccagggaagttgtgtctagattgtttcaacccacaccagtgaatcctctgtctactgtatacgtctcaacatgtacaactcagtttgaacatgggctattcaagacagtacctgtggaatgaggaagccaagaggtgaacactcttgactgttcacctgccttctgattggtctctataaagactgtggcatgttggaggcagaggatagcaccttagggactttgcttaaattttcattggtcaccaactatgttctagcactggtagttatggacaaaacaaacacagacaaatggagcttatgagaggccaagagcaggggttaagcagtaaaatacatacataaccaactaccagttagttagctgaagcacagggcacaagaaagatatctcagttgagtcctgaagaggagcccctcagcctggtggaagggtggcagcggtgttggggtcagaagtggagaagagcgttccaaacaaagtgaatggtctgtatgtgagccctctccagaaagggtcagaaggaaatgtagagtcttcttatacccaactcaacccactccctcatcccaacacctcttcttctggaattctgtagagaatgtcttgactggacattagatgtggttagatgacatctcatgatgaggccaccccagtgtgcccactttctcagtacacgtgtaagccccgcctccccacccaaagagaaatgttaagaaaatacacactcttaatttattatagtcgctatgactcaggcaggctgagggctagagtctagtagagttttcctaagattccttggggatttgaaggattcttttcccaccagctgtaggaggaggattataaaaacacatttccttgggacagaagaaatcccccgaatcttaagtcctggtgatttcaacagtggaggctaccccccagactccccaccccgacacctgcctccccttcattcccttttctgtttcttctcttgtgtagcaagggccaagtggacaaggagttgttgtcctttgggatcttgaccttgccccttaatgaagatgctgcccccttttattttttttaattttttgagaattttattcatgagttctatatctgcatcatttctacctaccctctttccctccaacatctcttgtttcccctactccctctcaaattcatgacctcttcttccttcactattattacttatgtgtgcgtgcatatgtgtatatatgtatatgcacacatttatctactattgagtccatttaatgttgctcacatgtgcacatgtttagagctgaacagttggtttggatacttcagatgagaagctcctggtttctgcttcttctttagactcagcttctacaaacgtggaagtagagactaacatagcttccttgtagctttaacattcgtggttctcatggatgaaacttagccaagagccaaaagaggtgagtcccacatgagaagccagggttggttgaaaaatctcaggatgaagttggaacaaagcccttcttctcctccttggataacttaggcagacccaaagctgacaccagtaaagggtcttttatttctctcttgccccagcccttttccagaatggctccacactatccatgctatatttctttccatcatctcttagaaatccagattcctcctttgtttcccaactgagcctgctattccctacaaggactactatgaatgtccagaccaagaatttaatctctgagatccataacataagccagaaaagaggtcttgggaaggccctaagagacagagaggaccatggtcagctccaggttcacgtatggcttaaggggtctgatgcgagttgggatctccagagaaagagaactgataggctgtatcaaggcgacttaatatgggaattgactcaggcagatatgacagctggaaggtccaccatggggtatctgcaagctaaagacttaagaagaccagcactttagtacagcctgggtctgaaggacgaggaaccaagcaacatttgagacagaagatagagaagatggagagatggatgtcccacctaaaaaacacagaatttccccttcctctattccatgcaagctctgggtagatgagatggtgttgcctgccctagttggggtggtttttatcatccaccaactcaagtgaaaatctcttccaaaaactccctcatagacacacccagaaataatgttctcatcagttttcttgaacatccttgagcctagtcaagtcaacacaaaaaatgaataatctcagaatctgattgccactaagcccaagagagtcactctggaataagtgggcagtgttgccatttattctgcttccacaagagatgctgagcaccaatattttaaagtcggatagataaagctaaacttagaaaagcaaacatgacatgggctggtgagaggacttgctatgcaaacctctcggcctaagttcaattccctggatcccatgaaagggtggaaggagaaaacctactccacaaagttatcctctgatcgccacatgtgcgctttggtgtgtgtgtgtgtgtgtgtgtgtgtgtgtgtgtgtgtgtgtatacacatataatacataagtaagttaaataagtaggtttagaatcaacttgtccccaacaaatgagaaaagaagatgatctaggaaaaaacaaaagtctgtggatcagatttagcctgtagctgctgtctgtctctgaagtctgtatttacaaagcttgtcacacttggctctgtatgcattcattaacttttttatttgtcatcgcctacaagtggacatggtaggatgctggggagaataggacccaacacacttgtacatcagggatagcagtatgttcagatcagtgtctgctgggtaggtgtctgtcctttgttcatccacagagcccagatatcactctctccattatgcaggtagcacataggataggcaatcgtgacttattatatatattttttgagacagggtctcattgtacagcctgctggcctagaactcactgtgtagaccaggttggtctggaactcactgtgtagaccaatgtcaccttgaactcacagggatccaccttcttctgcctccctagggctgagataaaacttttatacaactggccaggcgatggtggcactcacctttaatcccagcactagggaggcagaggcaggctgatttctgtgagttcgaggccagcctggtctccagagccagtgccaggataggctccaaagctacgcagagaaaccctgtctcaaaaacaaaacaataaaacccccaagatatgtacaaccacacctggcttgttcatgatttctcgggctgtgacttgtcaccaaccagactactaaagctacctattccagttcaatacacccgacatcacaaagagcaggaacaggagggtgactgcatccttccggcctgtagaggcaaaggagggtcccctgggatcctcagagctgtctctcagttctggtcttgtaaatccttctgtcaaaatgcaggtctgtgacttcaacattagaggaggctggtgcaggtgttcgaagtcagcctggaaaatgtaggaaaactgtcaaaataaaaagcagggatgactaaagagatggctgtgtgttagaagaatctaaactcaaatcctcagcacccacataaaaaaatcaagtgtggttgtgtgtgcacacctgtgatcccagtctttgtggaggaaagaacagattgctggggcatgctggctgccagcctaactccaggctcagagacaccctgccttaaaggaataaatcagagagttctggagtagcgtacatgacatgaccctctagtctctgtgtgttcacaggtgtgtaccctcccagatgtgctcaaacacaacataaaataaaacaaacattttaaaacaagggataaaacctatctctagaagccaaggacgttcattcatcaggaagacatcaaaatggtgacttctagcaggtaggactatgaagaatgggcttcagaaatgggcattcatggaaatctttgtggtggagaaatcatgtttaagcatcagattgttgttgggcgttggtggcgcacgcctttaactccagaactcgggaggtagaggcaggtggatctctgtgagttcgaggctagcctggtctgcaaagtgagttctaggacagccagagctacagagagacactgtctcaaaaaacaaacaacaaacaaacaaaacaacaacaacaacaaaataccattgagttcaaaaacaacaaaacaaaacaaaagaaactaacaaacaaacaaaaaaccagattgtctggttgctggctcatggttgtcccagtgagatcttgaataaactaccccctatccagacctcagtttcccctactgtaaaatgagagggaggttgactcttttcatagtttcttctggctttcactctgctctgcttcccgacaacaaagtagttctttggagatcacattccctgtcaggaagtgaaacacacacacacacacacacacacacacacacacacacacacacacacacacacacacactagtgaccatgagtgtgcctctcttacaagtgtagcaggagctctgcccactgtataaaggaaggaggagataactgcatccttggaagatccttccttctgaactcagaccgcacagaacctgctcgattcccacaacacagactattgatgtgtttttctgcatttcagtcctgttaggcccaactgggtccctgttcacacacagcttgctctagctggaactctaggcaaggagcacaggagtgggcaagagaggttcggaagagggctgggaaacaacacccttagggaccagaaatctggcaccattgactccattaagtctataaaatcaattccctctgggattaagtacttgcttgatatactatttttatcactcagtgagtctcattaattgacttactcaaaaattttcacttgttacagttgacttctctgggctcatggcttgttatatttcttctttggatagtatatcaaatttcagctattacaactcatttatttaaagggaacacaccccaaccaaaatcaaccagcgaagcttggtgtttctcccttaagcttctttcccctgggtcaacaactgtccactgcatgtcttttatagaacagggaattagatgtgcatccagggtcaacagagtcaaatcctccatcctcgcaggagtgaaaagcagaggctagctggacagtctcctctcactgctccctcaccaaaacagtctgcaatgtttggccttggcagtcatcacaggcaaaggtcacctctggaaatgagctgtgctgaggtagaagttctaggcaatgcccagaggaacaagtttgcataggtgtacttaaacgaagaatgacatcactttgtggtaccttgctacacgcccgctttcccaactcacttggaggccataaaaccaagagtagaggatcttgaccctctgccaaggtattgcgccaccagtgaaggtacctaatagtctccagtggacatgagctcagaagaaacgaaaccagaacacgagggacgaaagaatcgtgaaagagaggccaaaaaccagaggaagcagaattaatggaccaaaaagaacaggaatgtaaattaaacttaataaatagcttcaaagtctgaataaaggctattggaaacatgacacagggaataacttaggatttggggccaaatggaaattctggatgtgaaaaatatatacgagaagaaataaagagctccctgctgggctggaaaggtcttttatgcccttcttaatttctttaagatgtatggctgttcaaagcaaactatccactgtctacaagatggatgctcttagaataagacacgaatcgaaaatgagcaatcgacaagatgagcctgagccgtaggacagctttattaattataagtgattaatatgctaatgtcagacaaaacataccttaagattagacataatgtcagagaaaggaagtttaataataataaaacacgaattcatcaggaaaacgtaataactctctaagcatgtatgcatgtaatgacagctacaaaatactcaaaaaaagttggcagaaatagtgggaacaaacaaacaaacaaacaaacaaaacaattccataatcagaactggatacctgttttatctttctcagaaattgaaatgactagacaaaacaaaacagtgaaattacagaatatctagacaacaagttaacctatcttgatctaaatggcatagccttatagccaacacctagagattatatattcacttccaagtacatatgtagagctaggggtgtagctgagttggggtgtggctcagctggtagattgtctgcctgcctagcatgtataacatcctgggtttacttcccagtactgcataaatcagtgtggtggtatacacttgtattccccggactttcggaggcatacacgagaggatcaattcatatacatccatacaggcaggtaggccagtcaacccgttaggctcagtacaccttagtttgcaccctgctctcacagtgggaccatagcagaccaagatgtggaagtgagagagttagatttcttttgcttgtcacactcaccaggccatgaaggtcagactgagttagttatggaggtgaagcactgacctgaggccttggctaatccccatctttcagaagcatggaggaggggccaaactgaggggaacctggggtagaatacagcttgtgttctctctgtccctgttaaagagaggcctgtggcaaatcttggggtgctgctaggtcttacaggcagggagaaggagcagataagtggacaagtttgaaaacagaagagaacagagggagtggggaaagactattccaagcttatccaggagatctggaatccaagtggggcagtggtgggggatattccaggcagaggagagcctcccaatgtgtgccttctcggtccattgtctattcatttcttcatgcccaggcagcagaaagaaggaggaggaggaggaagaggaagaggaggaggaggaggaggaggaggaagaggaggaggaggaggaggagggtagtcttagctacattgcatgttcgaagccagcctgggctatatgaaacccatctcaaaacaataaccaaaccaaaccaaaacaactcaaggtacattttgatggggggtggtacgtgggattatgtggtaagtctgaatgcattcccaaagattgaaacctttttgctgtagcattactagattagaaatcattagtaataaactataaagatacgcatgagtacatataactatatagttatctatagttataatgtgcttgctgaggaaggtcctttatgaagcctaagtttctaaaaccatagcaaatactagggaagaaactgtagagacaagaaaagaaaaggcctacatgggaaaaacaatagaggccattaagaaaacaaaagaaatggttctaaagattaatgaaaggaagcatgcccacagaaggagttttacaagcatgtttgtgagaacgttattcataagacccagcaactgaaaacagcacagctgttcatagataagccaaacgtggagtgtcgtacaatagtatctgatacaataaaagggggagagttgtcaccatgtgtaagaccctggaccaagttctccatcttgttgaaggatggaagccaaatataaaggagcagatcctgatgattcatatatatgctctcaagagcaagcaaagagacagaatccaagtaagacgagtcacagttgcacactctggagtggtgctgatgaggggatacaacgacagctggcctatcaggaagagtaaaaggaagaaagaaaatagtagcataaaagaagaaagagccttctaaggatccatgacgattatgtagtgtgtattagtgtacgggcaatttgattagtgtaattggttgccactggtgtccaagaagggggtcattaattgtttttatgtctcaacttactcatgaaacacagggtaactgtccactggtcatcctgttagatatggggtaagcaggatgggtaacgggattgtttgggaagctgccctggatgaatgagcacacgtgtgttcctggagacatcggtgtcggtgcgttgtgatgaagctgaagaaagctcagaaaaaccacttttgctagaaacactatttgtttgtgtgactggatcacaggaagccacttgatcgtttcccccaaacttatagttctttgccatttgcaggattccttttaattcctggtctctctgggggtgggtgggtgggggctttgttctgataaactgaccctatgtcctctgaagaataatcagaattgtgaaaccctagtcttaaatccactttcatttcatagtcatcgtccttgtggactcatgggactttccctatgacaacgtaggcttctttttttttttttttttttttttttggtttttcgagacagggtttctctgtgtagctttggagcttatcctggcactcgctttggagaccaggctggcctcgaactcacaaagatccgactgcctctgcctctgcctcccgagtgctgggattaaaggcgtgcaccaccaacgccccggcaacataggcattttttatgcctggtttatcataacattttccatatatcaagctttatttgtacctagttaacaatgatatgtaggtatgccgagatgaagactgattatctagttgaagcatcttgactgttagtactgatgcttgcagtgagatttccatacgctgctattgtgctctgtttaggagagaaaagaatttaaagcatttttacaaagcttagcataaattactgtatctttttgttttcagtggtcagcagctcaagatccaggcaatgggaagtacattttcccacagatagtctgggatgcaaaccacattgttcatactgtcaaaaaaaaaaaaaaaaaaaaaaaaaaaaaaaaaaaaaaaaaaaaaaaaaaaaaaaagagaaagaaaccagaaagaaaaggaacaataaaaatgagatactgagtgagctttgaagtgcttgggtacaatggcaggttcctttgttgaatagcagcctttcctaatgccacgaagctagatctttatcatctgtttctgagcaggagacaatgaaaatgacccagcgtgaataaaagaatagatgagaaatgtggggtgataaagactgggaggatgccagcaagtgcccaggccctcattgaaaacaaatagttcgagtggggagagaggcaggctttatcctaccacgttctttttatagccctgatcccggaattgttttcccttgaaaatgaatggagtgccaggggacagtgcatggccttgtctcctggccttttcgctgctctgtgccaccatgttaatgaatgactgctcacagtcaccctaccagtcccattaccatccatattcctgctttagacacagagcttaagtgaggctagggctgaggggtgacactaatgggccttcaatatgtgagggtcctgtggctgaggatggcaggcagctgtcctggggagctttctaagtccccgagggtagacgaggaggtgtgagcagagctgaggcaagggggagggagacgctagaacaacaaggagtcccaaccaggaagaatgctcccctacagtgtgaagcatcccgaaggcagagatctatctgctccctcctcgctgtaacagcaaagctgtatgtgtttctagcatacaaatgcccagttggttgattgatgagcagatcccaatgtaggggtatatcaaacacggccagagacacattcgtgtgggttgagttgatccgtcaaagagaaagcatcaatcacatccacagagtcatggccatttcttgggctgtacaagtcatgtctacgtgacatggattctttaatctggatttcagacaggtcagttcctggtcatttatgacatggaaggcaatgggtgagattctgggaagatggtagaacttaaccagtcatgacatctgccctcttaatgcaagacatgttcccagacagaaaggaagacatgtggccccttacaacgccagagtctaagaatatgagcagggcagacttaggaatccagtccaaatctatgagatgcagaaaagaatgtgtcgaaagtccagtttgagaaatggcaccggaggcacaacagcactccaagctggcatggaagcacaccatacagacaacactgctttccttgatttttttttatttaattctcacaaaacttgctgttcattgctattcattacattcatgagctcacagaagctatgtttatctggtgaaaagatcagaggctctttcatggaacctactattgttaatttggtaatggccatgttgtcaaaatgccttataaatatttatgtttagagtttgccttaattacttttctattgttatgataaaacgccatgaccaaggcagcttataaaagaaaacacttaatttggggctcagggttccagggggttaaagtccatgactgttccggtggggagtatggccactggctggcaagcgtggtgctagagcagtagctgagagctccatcttgatccacaaacatgaggcagagagagctgactgaatggcatgagcttttgaaacctcaaagctctcccctctccatcctaccccagccacccagtgacacacctcctcccacaaggccatacctcctaatccttcccaaacagttccaccaactggggaccaagcattcaaatatctgagcctatggggaccattctcatcctgaacaccacagacccatagatctgggctgctcttagccttcatcagagacacttctttttgcagtgggcatcagtcagtatagaactggtcaaagagttgatagcaagcaactgtgaacgcttagccccaaatgggactttttatcgaccttctgacaaggcacgggaaatcattggagaggaagcagccagggtgtaaagccggaggatgggggaggctgtgcaatgctgccctctggtcatgacctggccattgcattcatgaacttacagaagctgtgtctatctgcacaagacctgaacaacatcaagccacccaaagtttcagagtggtcgggggagagctcaccaggcctcactctgaagtggggagctgccaaatgctgatagctgctgggggaaggagaatcattttcctttgggggggtgttgctgatatgttgtccatgcttccgtggatggagctatagccgtgcacgtactgggcaacaatcaccggattcattagaagacataaaattgagagggagcagaggggggctatgttactgggggtgctgagggggagctagagagagaaaataagtactggttatgatcatgttttattgtacacatgcttgaatttctcagataatgaaaatttaaaaactctgcatagtaagtgttaatgctattttaatcctattcatggaaatacagaagcaaaaataagtgaaattggggctggagagatgactcagagggtaagagcactggctgctcttccagaggacccagattcaattcccagcacccacagggcagctcacaactgtctgtatatctggttccagaggatctgaaaccatcatacagacatgcatgtaggcaaaacaccaatgcacataagataaaaataagcaaactattaaaaaataagtaaaaaataactcattagtaagcaccagaaacagaatgagcccatgtggtctagcagagattatgccatctcaaaaatgcatctatttatcagtgctgcccactagtctccaagacaggtacttcatatagattaatttatttttcccattttgttttggttttgagtcagggccttgcaatgtagctcaagactagtcccaaagtcccaaattcatggtcctcctgcctgtcttccaagtgcggggatcacaagtgtacattactcttcgggttcttattttccccattgtttaaagtgtgagtctcagatgttaagtgatttgaccaagttacaccatttataaattccaaaaatggcattctagcctggttatgtgtgttctcaaaagtgtaattcccattatctattaaaagagagtcaggccaggtgtggtggctcatgcctttaatcccagaactcaggaggtacaggctggtggatctctgaaagttcaagttcagactggtctacatagtgagttcctgaacagacaggacttaaaatagagaggccagtcttaaaaaacaaacaaacaaacaaacaaaaacaaaaacaaaaacaaaaaaatactttctggatggagttgataacttcctaacaggagatgattcagacttggtaccataagcctgattaaaatgccatggttcagaagatcatagtcactaaagggtaacctactaccttagagtctctattgctgtgaagagacaccatgacctcagaaactcttataaaggaatccatttcattggaggtagcttacagttcaatggctaagtctattgtcaccatggtgggacaggcagcatgcagacagacatggtgctggagaaagagctgacatagctacatacatcttgattcacaggcaacaggaagtgaactgtgacactgggtgtagcttgtgcataggtgacctcaaagcccacccccacagtggcacacttcctccaacaaggccacacccactccaaccaggtcacacctcctaatggtgcccctccctttggggaccattttctttcaaaccacacctgctgtttggacaaatgaacttgttgtcaaattagcttctacacatttatgttcatacccacacataagttctgctctcagccctgaccagagaaacttcatgctaacgtgggcagcagttaatgcatggactcataactagtcagatggctgagaagggtgactcttgagttctcagtcctacataggacatcactattagcccccacagggaccagagaacatagctggagagggagcagtaggatggggttaaactgtgtaatgctggcctctggacaccacaaggctgcttgcactcatcagctcgcttcagctgtgactgcctgcagcagatcaagccaaggtcacctcactctcaacaggcagcactcactggcttggggttacaaaagacaggagaggactttaggatgagagggtgtctgcatcagatcccgcctccaggttcctgccctgactgcctttgagggttacacagtgatgtggaagtgtagaccaaataaaccctttcctcctcaagttgcttttggccatggtgttttattacagcaatactaaccctaaccaagaccgaaggggccatgtttggagatattgtgggagagtgggaaggaggagtatggtcaacgtgttctggatacaggtacacaattgtaaaagagtaaatgaaagatataaaaaataaatcctaactgtcggtgttctaatgtcaggaggtggggcctttgtgaggtaataaggtcataaggatggagacctcatgatagacttcaggttcttctatgacagaccctgtatcagacctcatgatggacttagggttcttatacgacaagaccctgtatcagctccatggcacacacctgccatcccagcgggctgtgagctgaggcagaggagcctctgagccctcgaggccagtatgagggacacagatagaccttgcctcaagaaacatacaggactccagagggctcactaacttatgttctacctgtaagcaagaaggcagctgtctacagaccaggagggggatcctccctaggacctggctgtgctgacatatgacgtgacttccagagctatgcggaatcagcaccctgggtgtataagcctccacctccaattggcaatttgctttggcagctcaaagtcactaagactgggtattaattcatcattctcattggtgtggcaaacatcctgacaaaagcaactgaaggaaaccagggttgactttgactcatggtttggggtactgtccgtcatagaggggaaggcgtggcagcaggggcctgaggcagctagtctcagattattagcagtcagatgcccagctcactttctttaaaaactgtatgcattcacggatgtgtgtgtgtgtgtgtgtgtgtgtgtgtgtgtgtgtgtgtgcgtttacacacttgtaagtcagaggccagccttcaggagttgattctctcttcccgctgtggggaactggatacggattatcaagtttgtatggcaagtgctacttcctcctgaaccttctcaccagcccctcctttctcctttcattccctcctcgaccctggctcatggaaggatgctgctacccacagttagtgtgggttgtctcacctctgtcaacccgatgtagaaagtcccactcaggtatgcccagcgtttttctgttctaggctggttctaggtcctgtcaggttgacagtgtcactctcctgaagaggtcccaggttcccttatagatgtccacttgatgaggtcatacctgcacacgataatctccctctggctcactaagtagctgagtcagggcctcaagtaaaactcagaaatcacttcatctttgctacatgatataatctagtcagaggagtgacatgcctttccatagaaggcctcacctgcactcacaggggattatgtgcagtgcacacgcaggagtcggccattgggggaccatctttataattgtctacactatgccaaagttgttcctaggactaggcatgccttggccttcttccggtgagagcatggcctggttatgtagacatggctaaagcagtctccaccagctgcctgggctctggggttctgtgtttgcttcctcttgctcatggctcacacaccacccatcagtctgctttggccatggattagcaattacaataaaagatttcatgagaaaggggtgacatttatgtctaaaattgacttggtggctgacctggggtattatcttttaattatctcggcttcccctcttccccattgttgttgacagtcaagatttaattgtaggtattatttattgaaagagctaaagaggaaaaggccaaggtaacgcctacgaagtgaaaggaagcaacaagtctgaagacatcagaatgtcaattgatggaaccggcttctagactgcaagatgttatcattaagcatcgtgggaaaacagcatcttaattcaaccagttcagctcagtcttgtaacagaatccctttgctgtttcaagcttgtctatccagagcctgccttggggctatattctgctttgtttaggaggcttccatgttcttacatatacactttggcctcaaaggggctgaacaaaaaaaagaaggccagctaggaaccaaaggggtttgtaagataactatttaaggctttcagtctcatccaagaatgtctgacacttcgatatcctaagaaaaaattttccagtagctgtgtctaaacagacaacttctgctccaaaatcaaacttcaatggctttcataaactccccataaaccatcaccactgccgtcaaaggatggcccttcattcatctttgagatggaagagcttcaggagttttctttctgtcatctctcaatgcatcagtcagtaactctgctgggcccacaaaggccctgctctggagcatgggtgaagtgagattttttttttttttttttttgatttttcaagacagggtttctctgtgtaactttggtgcctatcctgtcactcgctctggagaccaggctggcctggaactcacagagatccacctgcctctgcctcctgagtgctgggattaaaggtgtgcaccaccaaccccggctgtgaagtgagattttattctaagttttgtttcgtttcattttgttttgttggagacgcaatctcatgtagtctggccttgtccccagtgtactgttaccttgaacttgtgatcctcttgcctttacctcctgaatgccagggttttgcacatgctaggcaagcgtgctaccaactgagcaacatccccagccatgtgaggagcattctgactagaacgaaaggcaagggaaatattgtgaccttcatgtctgtggtcccagttgggaacagcatgagtctggaatattctctcagtgttcctctgtccactcaccctttccaaacagcttcaaccccgaaggcctccaagagtttaaacatcttcctggatctgtaatgaatctgtgtaacgaagatgcttataaatattacaagagatttattgccttggtgtgaatttctctgataccagcagggagtttttaaacacaactggcaacaagaagcatacggtcagagagtcaagttactgttttctttcttttctttttttaattgttgtctgccaaggacaatatatttttttcccttcttcaaaataaactctgtgcaggaatgtgcctcaccaaatggctggggctctattatatttcatgcagctttctaaacaatttccaagcttcggctggcctggtgtcaaacagaaggcaaccaacaatagcaaaatcccattaaagccaagaaggttccttcctgaggtgagcctggccagaaatagtcatcttggctcattctccagtttggcaccagggactaataacgcatggtctcctaatggaaattgtctaatttcatccaagagctgctccagagagagccgggctgacgcactagcagtccatataacaacattcttcttggagtactgaacaatgggcctttgggagagactgtgataaaccacgtcagactccggacaaacatgagtgtaaaaatagccttcagaggcattgacacagccacccaatttctcaggaggaaggcccttggaggcgggctcattcagaaggcttgtgaggaatacttcatcagatgcagtaggagagggggagggggagggagagggagagggagagagagggggagagggaaagacaggagacagagcaagagtaagaacagtggaggaatgaagatggtgagccatgagagaggagagcagcccatggtacagggttaatcaacacaaatcatagttgtgtgaaattcccgttaacattccaaggctgctatctgcaaggaacagccagggggaattatgctccacttaaacgatatacatgtatatgtccctgtttttatgttccctttcgataatatgagaaatgtcacaatgggtgtggcagtgcatgcctgtaattccccacacttgggaggctagggcagcaagatggaaggttctacatgagctgaagcttggtagtcaattgcagaccagcctagtctccacagcaagaggtctcaagaaaacaccaatgatgtaaaattaagaaagaaagtaaaataaaaaaagaaaacaccagtaaaccagggcatggggagatgactcagtaggtaaaggtttgctatgcagcactgcgggtctgagcccaagttctcagcaccctcataaaatctgggtgcagcagagtacttctgtaaccctggagtgggggtcaggggcagagacaggcatactcctggggtttgtagtggaaacatgctccacgttcagtgagagacttggtctcaaaaaatacaagcagagagtgatagagaaagacattggcctctaaacatacacacacacacacacacacacacacacacacacacacacaccctccacatgggaagtttaaaatatttttccatgtttttctcagatgtagaagcaaagcaaatctaatttaaaataaattataaaatctcttatcaaaacttatgggatacaactgaaacaacatacaggaaattctgcagttgtaaaacatgtttcttagaaaatgacaggttacctgctaggtaagtggtggcacatgcctttaatcccagcacgagggaggcagagacagtcagatatctgtgagttcgagactagcctggtctacaagagctagttccagggcaggctccaaagctgcacagagaaaccctgtcttgaaaaaacaaaacaaaacaacaacaaaaaaagaaaatgacaggttaaaaataatcagagcctttaagtcaagagtcataccaacaagaaaaattaataaagattaaaaaataaaatcgagggtattagcacacactcattttctgccaccttggaagacaaacactgggtttttcttctgtggaacacattaaactgaatgttgccaagtatctatttagagaaaatatcaataaagatgatttctggtgtgttctgcataaaacatccctaagattaagtggtgttatgtaataagggctttgctgcagcccttggcaccagaataagttgtagctattggctgctattaggtacttttgtgcatgaggaagaatcacaaagctctgtttaccggttttagtttttaaaaacgtgttaggctgacattttcttttgattccccacttttctcattagttctgctaatgttttgctcagctccctgtgtgccttccttcagtctgaaaacctggaccagtggactgcctgccttttacagaggacacggttgcaaatatgtggtcaaacagggtgtggccgtcctgcctgggtagcctggacttgtctagagggcaaaaccatccccaattatttatctcttctttgcagcagatggaatccaggtctcccacgctctgttctctgccctgagtcttccgttacctcctgccatgcttccttccccctttctgggagtcgttctgatggcttggtctttgtgaggttcatggtatcatcttcttcatttggcatgtgtaatgcaatcaatatttttgttttgtttttgtgtcaacttcattgtctatgattttggtcagactagttgtctctgcaaatcacagacacatcatttgctggtcacttcctatttgtcatcccccatgctgggtatgggacactcagaatgactcagtctgtccagagatggtgactcttagccaggagtgtgtgttgtctacgtatataaggctgtgacataggctgtcaccgagatcaacacagatgctctgggatactggggaatgaaaaaaaaaagaaatgaaatgaagagagagaatgaagtcaggggaagtttccaggaagaagggtctcaagagacaacactgaaggacaaacaggagagagtcaggaagaggggagggaagtatgcttcagacgggtagctaagccacagtacaggaagaagggtgacagtatactcatggggggtgttaaggaattgtagtattgtggttttgcttttcatttccctagggactgatgttgacatctgtttacacaattctagctgtagtgtgtcttcgagaaatacccaatggaatccgttgtccattttaaaattggatcctctcattgccttgttgtaactgttctttacacatttattactaaagggaacttgttttagtttttaaattgcatttatttagtctatgtgtgttgcacgtgtgccactgtgtttgtgtgtagaaaccggaggaagattcatgggaattggtcctctctttccactttgtggcttccaggatcaggctcagggcatctgccttggcagcaggcacctgtccactgagccgtctcattggccctcctcacataatctccgtacaaatcctttatgtacagagattttataatttcaatatatctctccaattccatggattttcttttactctattgattgtttccttgcaagtatagaatttttattttatttttggtttggtttctgagacaggctttctctgtgtggccctggctgtcctggaactcactctgtagaccaggctggactcgaacctagagatcaacttgcctctgcctcctgagtgctgggattaaaggagtgggacaccctgcccagcttaagaagcttccttcctccctccctcccttccttgtttctctctctctcttttttggaagtacagtttacttttttaattgcattttggtgccatatataagaaatcattgcttagcatatgatctcaaagatactcttatgataacttctgtgggttttttttttttcctcatttaggtccacagtctatttcaagctaccttgtatctatggtgtgaggttagaacacagaatcttgtgtgctgatgtccagttaccacatgccatgtgctaaaaaagaattatcttctctcatcaattttgtctgccatcactcagtcccattctattggctcttctgtctaggctgtgccattacaacccctggaactcactaatcaagatgacttcaaactcagattcacctaccgctgcctcctgagtgctggggttaaaggcatgtacagccatgcccagccaatatctactggttttacaccatggctattagtcagtccttggatgaggtggcttaaggttagggataacttccctagagcatcttcgtagacagaagactgaggagaggctaagcaagcttttaatgagactggagttcacaggatggtgtgtttcgcaggaagagccaaaggcaggagacctgggataataacaaggggagtcagtctcacggagtctttgtccagtgagacttttattgggctgggcacaaaaactgttttcttcccaggttgttgtgacctactggctgaaaataatttaccaaatccccttactgttggctttcaactttgggttaattaaaggctgttttgtgtggcccaaactcagtgtggttgtttgagataggagatagctaaccaaatttattacctgagagtttaccttttagcttttgtttgtttggggctaggagggaacagaggacaacatctgctgtcgtcaggttgccttttggattgggggacagtttggaactcctaaattgctattttggtttattgcaaacttagcagtgacaaggagtttgagaattgcttgttgaaatactaatactagaagggttgttgttgttgttgttggtggtggtggtgtgtgtctgtctgtctgtgtgtatgtgtgtgtgtgtgtgtgtgtgtgtgtgtgtaggccttaggctgatgtcacgtgtcttccattattgctctccatcttagtattgttttttttttcacttgagagagtgtctcactatgtactcctggctggcctggaattggctgtgtagagcagtctatcctggaattcatagagatttgcctgtctctgcctccctagagtggcattaaaggcctgtgccatcacactccgtctgtcaccttagtttttgagcagtatctctcactgagtctagaatgcagtaatttggctgcagcagccgggcagtgagctctggccaggccttcctgtctttgtctccccagcctgtaatcacaggtacccacagccacgcccagcttttatgtggtatggggatcgccactcaggtcctcgcccttgcacagcaagcactgcacagagagccatctcctgagcgccctagatcccctttgagaagccgcctcctctctcagtctccctctcttcttgtctacactgccgtttcccccatgtttgctgcccttcgtgtttggtgtaaagttcaggcagctccatctaaccgtaaagactagttttaatcaagtctggacaagaactaatatgatgtgtgttcttgagcaaagcccagtcagtttctgggtgtcagcctgaagaattcaatcagctaacatcccgccatcaatcatgttcatagccttatgctaaatttgtactgcgcagccactgtcacatgtgtggcttacagaaaagggcaggttttccacacacacctcttagtgtctgtcctctggccctgcattgtcactattagcaatgacacatctggccacttttcttcctgttttgctacaaaggtttgtgcttcttgaaggcgagaggcttcagtttcccagtgtttggaggagttcttggcatataggacctggctcaacatatatatttgtggatgtaacgattgaatccctcaaccacttaataatctttttaaaaataagaaatgctatttgtttgacataatttttttcttaaaagaagaatttctctgcttcaatggttgctgtaagcttttttttggaatgcaggtaaatgatacttaatgctctaggctggagtttccaggaaataatattatatttactagcctggggcttaaaactcttttaaaatttggaggatttttttttttttttttttgctctctgaagtttggctattttcccattcttcataaattccccaaaatacagtcaacaatgaatctaagattccatcagtattgttttaatcgttttggaaaatgttgtgattccaagctcagggcccaaaccaatttaaaataatcacttttattttcatggtgtgtactaggttagaactccaaattcacattaattgtttaaaaatccagttgcaattccaaaatcctcctttccgaaagagaagactttgatgcaatagccacgggtggttccgatcgatctgtgtgctgttagctgggctcacactgtctccagttagaactgtagatatgagacccttccattcttttctcagacgtggatacagaaaacctgtttgttactagacacttattttgttttatattgaagatagatttttcatacagtgtattctggttagtttcgttctctcgtctcctcccagatcctgcctctccaccttgccacccacccaaatccacaccctttcttgacttctctcactagaaaacagtcatctaaaatgcaataaaatagtatacaataaaaaacaatccagaatagggcaaaacaaacacacagaaaaaagatccaaaagaaatagcacaaggaacacatatagacacagagacacaggcattcacacgcagagaaatccataagcccacaaaaacagaaatcataatatatgagcataagacctgtaagataagacaaaaaacacccagacaaagcatgaggacacacaaccttctaaaatgaccacagagttcattttgtgctgccattttgtgacctgtccttcagtgtggcttgtatacccagtgagactccactggaaaacaaaactaaacaaaactaaactaaattttccatcgtaagcagttgttaattggagataacttctgggttaaggatggggacttgttaccatttctccctcagctctgggacctcgccgttagacccgtgatgtccctgtgcacgctgccacagtctctgtgagttcttacgcacagcagtcatgttgtattcaaggcaccgtttccatagcatcttcatccccgatagcactcatcatcttcccacgttttcttccatagacttcttttcttggacttcatctttgtgacatcgagcttcaggataaaactcatttgtgtggggccaaagtgtggggcctggctcagcgggggaaggcgcttgcagatcaggctgagtcagataacctgagtagttactagaagtcatcactctggggaaggagaaaagtgattcccacaagttatcctctgcctacacacacacacacacacacacacacacacacacacacacacacacacactaaatggaatttaaaatgtttaaatctatcatttgaagggaaaagaataaattcttgcacactgaaagcttagttagaagtcctctgtacagccattttgccttgttttttggtttgggggagtggcagggcagagtctcatgtcagtcaggctggcatgaaacagtttatgtagctgggataaccttgaaccttctcactcaccctcccacatgctagagtaacacaggtgtgtcacaacacccaacttacaaagtctgaggattgaacctagagctttatgtgccgtaggcaagcaccctaacaattgggcttcctccccagccattttggccttcttgggtaccttctctgttccatggtgatcaggtacaaaggggtttgctagttccggtttggtttgagaatcttataacccctctaacacatagtctccagtcataggatcaaaatgacaatgttcacatagaaactttatagtcacatgtttccctagttcttagaaaaatgtctaaattaacaaaaatcctgagcgacttctacaccaaattagcacatggccctcacaatggaatgtatgctggggacatggaaagagaaataaggacattatgtgtagagatgtctccatgaagaatgcttgctgtgtttgagtgaagacttgggtttaggtccttggaacccacataaagacccaggcttggctctgtgcactgggaacctgagcagtcaggggcagaggcaggaggatccccaggggcttgctggccattaatctagctctagtttcagtatgactccccactgagcaatagagcaggacacccaatgcccccctttctctgaggatcatgtatccaatgtccactttttcatatctcaccccacacaatagtataactgagcttattaaacagctgtgttttaaacatatatattcagagaacactaacactatatctatgagttataaccactactgcctgtttgttatagtattaactgtagattgttggttggggagaagctaactgttcctggccccttctttctcatttctttctttttccttttttttttttaattttggacatgtttagccctggcatcattaaatgagaataaaagagctgagaacaagatccaagcaaagaaaagattttaactgtcaggaaagttagttggcttacagtaggctcttgctgcagacactcatctccagagactcaaggaagcccaggaaatctgagcccaggagagccctaagaaggagtgaagggggctggagagatggctcagaggttaagagcactgactgctcttccagaggtcctgagttttcaattcccaacaaccacatggtggctcacaaccatccgttatgagatctgatgccctcttctggtgtgcagatatacatggaagcagaatattgtatacataataaataaataaaatctttaaaaaaagaaaagaaggagtgaagggctgtcttgagaagagaagggaacatgatgacagctattaagagggagcagacattcctgcttctaggcatgtgtatcaaaagcaggctgtgaactgaaaatggacacacacacacagacacacagacacacacacacacacagacacacagacacacacagacacacacagacatacacagacacacacagacacacacacacacacacacacacacacacacacagacacacacaaagttataatacatctttagtaaaactgttaatagtggttgtgctagcttcatgttactgtaacaaaatacaggaggtaattaatctaaacagaaggtttattttggctcatttttagaggtccagtccatgactgacatggcctctgctcacctcaccagccaggacgtgtgtggtctgtctttcagaaagacctaactgttctattttcgtcctccttgtgaagatgtgagacacagtgcctatgtgatgaggtaaagccagggaacaacactgtgtgaggctaacgggagtgttagtccagtggcacaggcatttggtatccccagagatgatctgataacccaggggactgctaaatgaccaacagatgaccaataggcgtgtcatccacactggatgatttgtgttctgggcaggatggtgagagacttcaccatgatactttgagctgcacacaatagttcatttaaagacttttccacttgatgtttttggactgcagttggtggtgggttacctcagaaagcagaacaatgaagaagggactatacacactccttcaagaaaaaaaaaaatcctgctgtagggtctgttgaaggatggagtcacccggtgtcctctcagccctcctcacagcacacattcaatgccattcacatcctcttgaggacagtttgacgcaaggcagagccagtgggacagtgcttagtggaattaagattctgggcccacctttctacctcttctctctcaagagacaagtattactcaacactcagacatatgcacatatatgatatgtgctctctctctctctctctctctctctctctctctctctctctctctctctctgtgtgtgtgtgtgtgtgtgtgtgtgtgtgtgtgtgtgtgtgtgcacgtgaacgtgagcacgcatgattgtgggcctcagaagtgaaaggttattcatattatggagttgaaaggcatcgaaaccctacacaaccacttagtgctggatgatgtggatggaggcggttcagagtgcaagtgaaacaccatttcctaacaactgtaaccttggacaagccacttaacctctctgagtatcagtttcctaagcccaaaacaccctctctcccccacaccctagtggtccattattttaaagagtaggtaagacgctacctgtgaacagggtagtgtcatgttattgctggtggatgaccgattccctcaccctgtctggtgacttttaacacatgacctaagggcttcccatgctgttggcaacagggaaggaaatggttgaagatcagagccattatttctttgcaaaaaacgaagtcgtctttcatcccaacagtgttgctggttcagggattgtccagcaggtgtcagcagagggaagggaaagatgcctgggtctgatgcgctgagacagggctggtggaggagtcagctatgatttcacagctgttccagttgtggggtggggatgcaaattgagagctctgagtgggagacacacggtcggttcagtctacagaatccctttccagggtcctcacccatctcctgttttttttcccattcctgcctcgagttttctttttccacagaacctagaagctggcatgccctcagtgacttcctttctgcagctggaccccacctcctaaagtttcagcttcctctcaaaataatgccaccaggtggggaccatgcatgcggcaggtaggaatatttcatattcattccataacagagtcttgagagctgtgtcctcacatgtgaattagccctactatggaggtatgaacttactaatgaagagtgagtttggggtccctgtctgccacaggataaaagcagcttgcaaagtccatttcggttctctttgcactgtgtgtttccttaaagaagtacttctctggaatgactgtcccttcccctgagtggcaggtgtgttttaaatgtagtgttattgatttagtgtacctagacttccttcttttccctcaacaatgaaccattcagattcaataattcagaaaacaaacccagcgtctagtaaatggctcattcctgggagctggcgagcacacctcatgatgggcaaatggtttctggagtaccagatggcctcacagtttctacctgtccttccaggatgtgccttcactgcaattggatgtgcttggatgctaagttctgtagtgtggtgggctctaccctagctcacctgaggcctgaggcatttctagatgtaaagataaactggatagagaagccgattttaacaacaggagcaggtttcaaactgcttgcctctgctgtcactccccatctctaaagggagttggggaaagccaggggagggtgtaacaagagggggcaggaagagagacgagtgtcttcatatctatgaagtgacacatcctagaaacaggagagacccccccccatcctccagaaaagggcaaatgggaccagacccaaagggcttcgagatttgggtgccagacctacgggataaataaaatttaaaagggggggggatcatggtccaggagagggtgggtgatcagagagcccagcacacgtggaagtggggaggagcatgtggattgtcaaatggttacaggtgctacaggctgctgttcttcccacctcctagaaagtccagtttcctccaacctgagcaaacccaaggagctcagaaaatgggaggcaagtctacttggaatacctccctctccccataaatgtactaaattgtactatctagaacccacaaggaaaaaagtccagcattcaccactaaacaagagctgggcctgaagcccataattaaacctcggctggtggagtgacaggcataccacacacaggtacccattggaggagcacacaggttcctggctggtggagtgatgggcacacaacacacaggttccaacagtgttgtccatagaatctctcaaatgcttaaatccaggctatgctgtgtttcctttcccgccttttgactgcgggtatatatttcttggtcaaaaaaaacaaaaccaaaaacaaacaaacaaacaacaacaacaaaaaaaaaaaacctgcgagtaagtatcctgtttaaaagattctttaaagtgaaccggagagggagttcccatgtggagataggagtaactttatatattacagtccccaaatcctttgaaagatctggctagttcaagcccatctggagttatcttcctacaataaggaacaccaccatgctctcttatgtatgtccctgggtttaaagtaagaatttgccccttttgagcacaagagagaactgaaaagagaccagagctttctcttgtctgagtattgcattgcatccattgctttcctcaatcttaaatgttcagaaaccacattgtcaaattattaagggacctgcgaagaccttgactattcctggtattgtgaaatactttggctgtgtgtcttctctggaaaagacaaaggggatagattgcacgtctataaacagcaatcataaatgagcaaacgccccaggcgcggtagtgcctcccccccaaattttgacctttttgatagacgcgtgagtgtgaactaagttcaagtaatttgatttaatcgggctcatttctatccctggtggttacaaggtcccccgggagtccacgcctctgcccctagggcctccctgctcaggcaacaacaactctgggctagttcatttcgccacagccctgaacagctcggaaagcaaagattaaaggcgaaagtcacagctgcatacttatattttcattgctagaggggaattgatttccgtgcatttattttggaagttgtaatacagaagagcggatttgcgtcaccacagcaacttgccggtggagataaagttgcacaaatattgaaaggggaagtgctaggagtcattatagagtttttctccggaagaaataaggatttctgcagtatcctaaaatactagggccgcttctattttgagaccaatctcgcaggcatatccgctcatttagtccaagtttgagcccatcaaaaaaacaggagatgacctgaactccggcgagccctgggtttcctgctgctttctcggttctgaagggtagggggtaaagaagagggcagtgtgcgggctctcaccaaggcgagtgacctgcaggggtgaggcttgggcctggagcaagaaagacccacctacccaaaggctgccttttttctttttctttccctttggcgttcgccccctaggagctccgattaggccttgggcagtgggtgaggctgtggctggattgcaaaaatgccgctagcccgggggaacagaggatctttccgaggcgatacagcctgttacagccgacctgtggggaaagaagcccttgcaaactgtctagcctttgagccgcggggcgctcctggtttctaagcgccacagatccggctgtggacactgccagatacctagagcgttcgggttctgcactcacctcccgctcagcgggtctcaaactgtgcaagaaggaaaaagggagccttttatccctaggggaagaggtgaaggtgcaggcttctaagttctttttatcagggcctttggtctaggccgtttactgtctggacgtctgcggccaaactggaatcgcagccgaattacgaggcttccagaaaagaaagaatagaggagcctacacgctctctccaccgggctggtgacttgctttccctaagcacctggtgaaattaatgacacggttctctctcacctcatcacagcagaacttttagccaaagtctcacctcggtggccttgtgctcatcacaagtccacctcctgctagacatgacatccggcccctctccccaaggcaccgctgccctcaactgtctatacccctctgtccctgatgccgggagttaaggccagggagcctttcgcgagggagtggggcgcagagtagaaatcgagggaaagacaagaaagagaggaaaaatctcagtggctgtagattctgtgactgattagccttagctgatggttgtggtccaggagaaaggcaaccgctaatgatgacaatgtcgctgaggaagggccacaaagctgctagacgttaattaactcaggagcccactccaatcctgaactgatagtagcctagcatgtccccatgcgttttcgggtttaactggtatcttagagctgaggagaaataagcatgccttggaatctcatttaggagacaattatttgtacaatcgaaaacaaaagatttgatggtttcgttattgtcgttattttattttcttcctgaaaatgtgcaagaacagctcagcctgtgatctgtttgggagaggggcggggaaatccattctgactataatttaaaacacaacgaattcttaaaatagagatgttgatgctacagaaaactcccgctccacatacccagagttctaaagaccccggctagaatggaaggcgctggctgtggcggctgggacagcgcctcccgccaacaggccaaagcggatcctggaaaaaccgccaccgaattgaaagtaggtatttaatctcaaaggcaacctctccctggcacttgcaaaatatcggacccacgtgaccagggtatgtggtggccccgaagggtggcacttcctacaaggtgcagggagaggactcgcttgctgctctcctgggcccggtgagaaagcccgttttgttgtttcctaggctcggggcaaaagtttggatgtgtccaagggagacgtttggagccatctatcttattttgtttgaaaagtcactctttcaagttgtcactggaatgacatctcagaataaaaataatttgcggccggccctcctctggcttctctgagaagctcctgtgagctcggaggcagacggattgcagatttgggccgggattccgggttgcaggggcccgggaaagatggagcctttgccgaggacaccagaatttgggataaataaaagcagagagaagaatcgcgtgaaagtagaaaatagaagggacagcctacggtccgcccgcgcggtctgttctggggggatgagggaaactgttcattacagccgagcatgggagtcccagcgctcccctcttgagacagactcctcgctccccgtggcgggtccccgagcagcaggccacagaggacagccagaggccggaggagccgactctccgcccctaagcggctcctagggacgcgcagtgcttagctcagcccacgcggccgcagaaaacactttggtgtggccagggcgtggctgaggacgggccacgcccctctttcccaattcccctccactcctgagtcccattggtcacataggcgtccaatgagcgcacggatcaaggtcctaccccgggtctgactcgaaagctcctgccaaaactttgggagtttttagagaggagttttttttttttttccttcttcttaatttttttaagctaacggatcattattgttgttttaaatttagctcttagggcttagctgtttgggtttttctttcggtgccgggcccctgtcttcccggcttctccggagtagcggagcgaggccgcgcccgcctcgtcgctccagcacccggctaccgcctcctccccgcggggagcgcgctcgccgcgccgcctttcaagccaggccaggggcccaggcggtggcgggaggcgaccgggccctcgcctcctctctcggtggcactagggcgccctgctggccctcggcttcagtgcgggcggagaaccgaaagcagaccgggcttggctgggacaccgcctctccccgagcccccacccactcacccactcacccggggccccgccaggatcctgccaggatgttcgcggccggcctggctcccttctacgcttccaactttagcctctggtcagccgcttactgttcctcggccggcccgggcggctgctccttccccttggaccccgcggctgtcaagaagccctccttctgcatcgcggacatcctgcacgccggcgtcggggagcccgggcccgccgcagagggactggtgggggcctccgccgccctcaccgcgcacttgggctccgtgcacccgcacgcctccttccaagctgccaccagatccccgctacgtcccaccccggtggtggcgccttcagaagtcccggctggctttcctcagcggctgtccccgctctcggctgcctatcaccaacatctcccgcagcaacaaccaacgcagccccaacaacagtcgcagcaacagcctccgcctccacctcgggcgggctccctgcagccaccggcttcagggacgcgggtggtcccccaccatagcggctccgcccctgccccctccagcaaagacctcaaatttggaatcgaccgaattttgtcttcagagtttgacccgaaagtcaaggaaggcaacactctgagaggtacgttctggttgggaggcttcaggcctcataaccatgggccctggtcccatgcgggtttttgttgttgttgttttggtttggtttttggtttggttttgtgtgcttttacacttaaggacaaatcggtagaatgacagagaagaaaacgaattgtaagataactatgagacatttaaaactcagctactctaagtaaaaagtgactctcggatgcttatacagcacagaacgcgtgtcaacaacctgatcgctgtaaacttttgcaaaagtgggtgggtataacctgtcttttgaatggcatatctacagaaagacataggcctttctcatagggaaatctcggcgtggggacattttgcatttatttgatttccagtaaaatgcttcccaagaattgtggggaagcaaaactgctagtctaagctccggaggggagaaggcagaggaagggggctagctagcatcttagcaccattttatgaaaagctttttcttgctggggggggggtagactggacgtggttgatacaggggcggttcaagccccactcttggcggctgtcaggaaactgcttcccgtgaatataggggtctttcttgacttcaatcggataaaactggatcaagggagaagggaagagagggtatgagcttgtccaacatgtaaccgactcttctttcctgccacccagatctcacctcgctgctaaccggtgggcgtcctgcaggggtgcacctggctggcctgcagccttcgactggacagttcttcgcgtctctagagcccattagcgaggcgtctgctatcctcagccccttaagctccaacccaagaagttctgttcagcatcaattccaagacacatttccaggtagaaaacttcccgagttcagtccgtgaatctctgaacttagtggtcagccgccgggcctgcctttagaaatctcggtctgatgccgctgcaaagggtcgaaaccccatagtcggggtaggagcctcccaaatcctataagagaaactgaatgttctttttagtgggacagttggagaagagaggggagccaagatagtgtgtatgtgggccactggccctattcttttcgtccagagagggtggtttgaaaatgatctctctctctctctctctctctctctctctctctctctctctctcttacacacacacacacacacacacacacacacacctagttttgcttggctggttatacccctggaagacaaatgtggaggagtgtggggctgtcactggcaggtcatttaggccccaggggcagttccagctattttagcatgtctggtggctgtgcatttagtttatgcatctctcttgaacgaatccacggtacagtagccagctcttcccggctttaggcctaaagtcatctgggggaggggggaataaaaattcttccttaggccattctagcacaagggaaaggaactgggaggtgactgtgaattcaaaacacctttaaatatccatgagagtcagaggtccacagactgcggtcacactaacattaacagggtcctgaacctctcttcctgctggttggcaggtccctatgctgtgctcaccaaggacaccatgccgcagacatacaagaggaagcgctcatggtcccgagcggtcttttccaatctccaaaggaagggcctggagaagaggtttgagatccagaagtatgtgacgaagccagacagaaagcagctggcagcgatgctgggactcaccgatgcacaggtaagccattggctgggtgttctccctctggcagtaaacggtaaacaaggtagatcgcaggcctcttccacagcttcttaccttcagcagtcaaaacacaacgtcttgaatttcgagaggctttgtggtgtagcagctcaaagccagaggagaggcgggtaggggtggagaaggaggagagggacggaaagaatagcccattcctgaagatgtatgtcaacaatcatcgcgtgtttattttggccaagaggccaaagaactgtggagaaaagcgaaaaggccactagactggagtgcgcctcgctgtaggaggcagtttatttcagaagagataaaacccagagtcaatagattattgttggttcctgccttccttcactgggttgtgaaatcccacttgtgaggaactgaaaatataatttcaaacagaatgactttgaatcgccttaagacagtgagtgggcttggagcaggcacagtcccactttttaacagcccagcttctgaagatggtgtccttggtgatggagttgagtgagagaaagaaaaaaaagaattttttagggtgtccaagaacatttttcagtaggtcctgccgatttgattaaaaaaaaaaaagacaataggaaatctattgtcctggaacatttttttctttctcaatttcaagaattagagtttctgtttgctttcttgactacagcacactcttgttctacatttgattgcttcagagttccacggagcagaagcctaagcaggctggtctctctctctagctgcctggttcggacttctgtccccgtgtctttctgttctccattacacaacacgcttcctcagcacacagacactcgggaaagcccagccgctttcctccagctgtgcatggtatttttaaaggggaagctggaacttgtgtgagttcgttcgctccccccaggagatcatatatttatttatatagatttttccctccatctcttccctgttcctacatagctgcacatttaatcccaggattttttgagccccgggagaataagtttgtctctcacaaagacagggtctacaccaactcttaggtaaaaatatgctaaagtgagcctcctttaacctaaagcccagcaggtacccattctgatgggattaactcattggtttcccctgtccttttatccactccacccttaaaacaaacagtggtggccaagggctgtaatctgagtacccaggaggcagaggcaggaggatctcaagttcaaagccagcctggttcaaagagagagaccttgactcaaaactcctaaggggagggggtggtaaggtgaatttttgcaatgaattgctttgggtagtgaatgcctggggtgcagggtgtgtgtgtgtgtgtgtgtgtgtgtgtgtgtgtgtgtacagaagctcttcataatggctcatcaaaaccttggcatggtgtacacaataggatacattgcagtttgggggtcatggctccttaattttaatcagtcttgtgtttggtgagattacgaagaatctacaagaaatccgtccctcacttgtacccaggtcattttaggcttgagactcaaggtccacgttaaaagaatgttccttagtgggttgggtgggtttcaccctttgataactcctgggtgtttatgcttagcttagctatagtgtctgggttccgcaggcgtagcgagcttctgccctgctgtcttctcttagggggccaactccaggtgtaggcagctatttaatctcgtgtctcgtctgatgttgcacacaggtgaaggtgtggttccagaaccgcagaatgaagtggcgacactctaaggaggcgcaggcgcagaaggacaaggacaaggaagccagcgaaaagccttcaggaggagcgcccgccgagggcgaactggaagagagaagtcccagccgttccgagggcgaggccgagagtgagagcagtgactcggagtccctggacatggcccccagcgacacagaacggactgagggaactgagcggtccctgcaccaaactacggtcatcaaggcctccgccgcgggcgccctcatcacagccagcggcagtgcgagcggtggcagcttcagcttcagcagcgccagcagcctgggtagcggcaacgcgggcgcgggtagtgccaacagccttggcggcagctgctctgagctgctccccgcgcaccagccctcagtcaccagcaatccccagagcccggagcctgcccaagccccgcttgcaggtttatagacaggacctagggtacttacggcatggcgtggcatgcagcttccccaacactggctggagtttgtgcctactttagttggtggcaagggtcgccaaggcgggagacgccaagggcagcttcttgggggttcgtaccctttttcttgctgcctaggctgcctgaggcctatagctcccaaatgacaggaaagttttgaggttccccccgccaaagaattcaactgttctccctaccgaagcagctcacactgtgaagtgtttgacggaactgttcctccgagcaccaggggtcttggcataaggacacgctgcacttaggagtcctttaacttgtaaataaaatgtttactacggtttgtaaaaggcctttggcttgcgggcttgctggggtattgatgttgttaaataccaaagatgggggaccagtaccttagccctgatacgcagcagatggcaacagctgccgagaggaaagaagccccagagacaaagatggagacacccgcagagccccctgtgtggtggtagaggtttcactcggcacctatgactgcccgggtgcgaggcctgcaaagaacaaactgtaggctcttaggcctgttctgcagatggcttccctaagcaggcttgggattcagtgagcacacaagcgtgcgtgcgtgcggcagagctggaatcaggttaggcacagccatgctccctaggcctttgctatgtatgtacccagcctggagtctgggggctgtaccactgcaactgcgcagtgtctaggtagggaaacccaaagcagtatctcaagaaaaggacagaaaggtcacaatagttagggactggagaccaggtcttcaaagtgccaaggcccttgttttaaagaggccaatgtaattgggcagtaatgaggtgagtttgaatgttagacaaaggtgaagccagatgtggacctcctggcccacgcttgtccagtgagtttaggcaacatacttaccactcctcccctgaacccagataaaatctttctgtgcaattcttccactgaaggcacccactacaggccttggggagttaggagtcagtgcccattactgtaggacactttaatgtagccacgaggaggatgaatactagaaggcttttctttttaaatgtgaaggccttttctacaaccaacaacaacaacaacaacacaaagatatcctcaaccatttttggaacagagtagtgccagggcacaagccctcgtagagacacagcatctaattcctggaactcctcccgcccaaggaagggagaagtgcttaggcctggaatccttggaggcattcttcttctgaaagaactgcaaagattgggctgctcagttcgaatcttgctaatcttcttcacattatcatttcctggagctggttcctggattctcgctctggatctgtggtccaggctagaaggaagaagacagatttctttctttctatctatctatctatctatctttctttctttcttccccccctctctctctttctttctctctctctctctttcttgctttcttttttttttgagaaagatcatagagaaagcagttgagggaaagcaagaataaatcaaaatagactgtccccactagggatccaatttaaaggggaatggtgaactagctattatccctagttactcacaagatttgggtgtcatgggcagcccctacagcagcccctgaaggtgggggtgtgacggtgccccccaagttttccattggggtgtacttctcaaactttagtattcgcccctgtacctcaagtttgcagccattgcctagttttgtcttttctaactccaaaaatacttaaaacctggaatccaaacactcaaaagacatgggattctggcttttaagagagcagagcccggatatacccacctaagcttggaggagtggggcctgtctggggagagactgggaggggccggtgctctgtgcaaacttcccagcatctcgggctcacggcgccccttccccagctctctcctaacaccgacggcagcagcttttcatcaaggcttctagtcttagtaatggaaggaaagaaaccattgttggggtaaggtaatggtgtgcgttttcgggtagaatttcggcttttctttttttctctcagattgggcgagggatccgcgggagctggggacgaaattacccaggcacccatcacctgcaggagggtgcatggaagtcccacctggagtggggagtctgaaagtcgggtggtgctctagggtggcctgaggctcgttagtctttgctaccctctccccctagtttctgactatttatctcgtgaaactctcgcttccaccagcagccataatgtcacaatccctgtaaaatttcgtttatgtgaaaaagggcagctgcagagagaagcccccagcccccgcccctgcccccggcaggccgctggacccaaggctgcctttcggggccggagccgtatggttttgtggcggaggctgcttgctgggctactggggtctttctggaagcgcttgatcccagcctgggcagcctggggttgaggtttctgaggcgcagagaaaagagtggaagatttgcagacgttagacctctggcctggttggagtctggaggggtaggcgaacgagggtccggagccgcacagagccaaatgcagccgagctgagccttttctagggcttatgcccgccagagtccctcttctaaggcttgtggtccagactccaagcagtactctttgaacagagcgggacttttccttacccttgcaggagtcccctctgtgaagagccgattgaaccacagtaccaaagcctctgaaaaacatacgcagaggtgactttcactaggcagaagaagtaggcgcctgacactcaacctccacccctacacacacacacacacacacacacacacacacacacacacacacacacaccagggacagaaatacagatgggcacagaaacactactgtctgttttaacaccgtgtgtgtgtgtgtgtgtgtgtgtgtgtgtgtgtgtgtgtgtgtgtgtgtgtgtgtgttccattctctgaatggcaaaaggcaaaagaaggcgaggagcctcataccaccttattctgcctctgtgggtgggacgctggtctccgtagcttttgtctggcgccaccttctgcagacaaaaaccacggaaaagcagatccaccttctgcgtttgtggtcctctgcagaaggggggtaggggctctggatcgaggagtatgccaccggctccaccccgctttccagccccactggggccaaagctctcaggctctgagcatcgcgaaggccaagtctttaaggaagattctagcagactgggccaaggatagcactccctatcttcacacactcctcacccctacaagggttgcaggaagctgtagctccagctctcacaaatccccgatcccctccaaagcccggagggtaccaaaagaaatcccaggaactctggaatcttttctctggctgttgcccctctccagccccatgacaggcatggtggctgggtcagactgcaccaacggaaaaggcaaggtaatattgttagtcccaggcaggctttcttctaggtagcagagatccaagaaccctgaaattgggcccaggctcctctgcgcaggcagcctctattgcctattgagggtcctcagaggtaaggtaggaacctcggtcttcagcaggggatgctctataccgccgccgccccgccccgcccccccattagaattgaacattatactttatggcactttaaccagttcaggaatacgacttccttttcaagctatgacatctttaagcagactgctgggatagacttggggcaagcagcaaaagaggtggacagtggacacgccctctttccatccaagttcctttttgtctcctcacctctttgaagaacaggtggagatattgggaactcaggtttccccctaccatatagtgacactgcactggagaaggccaaggggcccctaaacatgcaagacattgcattctcacttctttagcctctgggaggtagagtaggctacacatccctcacttatggtccttgtggagaaccatgctatgttagagaggggagttgaaaacctgagtttaacagatcttcatcaccatggcattttcaaatgtcttgatattacccagggtccccaaggcaaatggaggctcttgtatgaggcattccctcatcctctggagagtccagcctgctttcccagagtgggatgcacttggtaaggtatcttctcactcacctgggttctcacagagtgtcaggctctctctcctcttgcaggcaagctcaggagtgttgggtcctggaaccctttgcttcctcaccctccatcattttagaaaagatagatggaaacaaagatagtgtttccatactgttattacttctgatgctcccattctagggatgacacaggtgacaggaaaagtaaagacatttgttcaagatcacctggtgaatgaatgccaggaccagtgtggaccttgggactctcatctttggaagaaagcaagaccatgagagctttctcctgataggcctgaccaacagagtctgaccctaaccaaagctcatcgaattttcacaaaggagaataatagtctcagaatcataggctaggcactctgtcccgcaccccttcttcccttgggtgaagcaggggtggagatggtggtggagtgtgcccaaaaggtggccggctgggatgtctgctggttgccactctggtccccccccttgcaatgtcccaggctgtgcagcagttgggctctgagggtcccgccactctctgtggtgtctttcagctgtcctgtgtcatctctgttattctgggcaggaaacagaactgcaatggtacttgagggtactgaggtgccagcgctctctctccatttccctccctcccgtcctccctgacctcacatttaacttcagcagcaacagataacaggctaaaacccttggtgtggtctgtggaagacctcagggttgttctactgagttttctcaccttccttttagcgtggtggtgggtagggtaagtggttagtgcatgtagctgggagccagcgctcttgatcctaggccagtataggaggatccaaattagccccagaagtatccattcattcataagttgagcaattagctgcaatgaccttgaaaaattcatctaaccattagtgtcaagttccccccaactctatgtacaatgcaagtaaacgaacctaagtcacaaattgccacgaagaccagttgcattaaaaaaaataaaaaacttcaaagagggaagtagccagtatacaattagacacaatctattcttttattattgtttatttattaccgtatttgttgagatagctgttaatgtttacacagtagtcaaaaaagaaatggagataattcatattcacccagaaactaaatcatctgaagctaatgaagcttatgaataccaggctactctgtccaaatgttccctggaaatcttctaagactttgagtgaatgtcagggtcacctgtccccatggacagatctcgagtcccatactctaggagcagtacctggtgctgcacataagacaggcatttggtccaacccttgtaggtgtaactgggagtttggaggggaagatgctggagttttctgacacatgatttgatggaggttaaagctagtctggagtcccaggagggaaaattacgtgcctgctgttgaaatatatcaggacaaatggcactttgagagttttaagatcttaactaatagcaaggagagggtcaacacagaaaacaggaaattaattatatggctttcaagggtgaaaacaccctcagatggttatgacaatgatggtgatgatttgtggtgctgggatttgaacctagtacctcatgcttgtaaggcaaaaggtctaccccaggaaccccatggggtctctgctaagaggctgaaaagtctagcacttaacaaagtacttggtgccctcaaagtatttaccggagaaatgaatataattattgtggctcttgtctttagtacgaacgagttgcatacccaagagcaagccaagcgacatggcaaggagtcggaacagcaagatgctagggaccttgggatgctgagaccaccacagggtagtcatgggagagtacacaggcagggctctgggtacccggactggttcacttatagttgggtaccctcgaagatccttggtctcaccttataggtggacgctgactatggagctgttaaatgatgtccgaggtcaacctccctctaggtgaccaaaataagagccaggacagaaatctaaaagcttcgcttcttcctctgatctgagagcgctggaccccgagggaagactctatcttcaaacagaggagtagagcaaggagccttgttggtcaccctcaactaggtaaacccagagtgatggcccaagccggtaaggacagcacgcaggaggtgaaagcaggaggagcagaagttcaaggtccgcttggggctaaatgccggcgatcctgtcacattcgcctcaccctgttttttctggtctggaagtttcagcctcactttgatttgatagggctgtttatttttatttctctgaatctgggagaggtgctaggctcccagccagcacagttctcagcgcgttttggaagcgggagaagctgagcacatgaactaaccgggaactgggctcttcatctagcaaagcccacgtgcatctgtctgtactcaaggccatttactaagctacaggcggccccaagcagtttccaaaggagcagacatgccttcccggcccagggctcagatcacattaccggacaggttctctgtttttgcctggtttgtcactggttccaggctaggggatagttccagatcctcggcagtgccagatcctcaagcctggagaaaggcttctagtccctagcaagctagcagaccgcggtgggtgcgctagagaccacggtgggtgcgctcaacaatctaaatccggttccctcgggctgctcttctgtttgtagggtactttgtcctctttgaggcagtcaacgtagtgctcgacaactcacatccggggcccttcctcttctctagcagctcctgcagctcttcctacaactctcctaggcctagattctcctttaaggctggggtgggggggcaccttaaggagcaataaaagcagcaggccgactaaagactcaatttgtgcaatcttgaaatcaatatttcacagcacagctcagacattgccgactctcctttcttgactcgctgtttttccaacctgttcatgtctccagctcctccctcttccccaatctactcccagccttctggccttccttcccttctgaaagggttcaaagctcctattgaggttttaggatgcaccctcaccttctgctgtgttctggaataatgtagagaaggtgtgtgagtgaaggagcaccctgggctaattcccagggtggtgcaggataacctgcaaccaacaagtatagaaaagtggccatttcagaaagcttatttaaaaactaatgggtgtacacaattcctagtggaacccctctgcagcatcccattctccccagaggcattgttggaacggtctagatacctgggcaacctgcaccctcagcaccattgattaatggaccagccactccagctgcagtgtgctcctactgctactgactctgttacacaccaaccccttttgggttgggagcaactcgtgtctgggaatggacagatgggtggatgtctgttcgcttagcccaagcttttaccagctggaaactggaaatttcttacccatttccctgcatcctggtctcctgccttttccctgtgaaagacatgtcacaagaaaagcaacctcacctttcccctacccatgctctcctattaaccttctcactccagctccatctctaccactccctcagtagactctgcaacctaatgcagatggatgagagattcgaaccagatactgagcaggatcataaaccacacccagctctcatggcaaccagagggcatggggtctgtgaatctacaaactgtttaattaagctgttatccctagtacaccattacgctgagtgtttgaaatcaccagtgcggtgtgtgtgtgtaaagaaccgaggaaaggttgtcggaggcaagtctgcaatcccagcaatcatggaagatgagcagggagatttggaaatggacgcttccctgggctacattgtaagacccaccccccaaggacaacaaaaacaaaacaaagacattcctctccctgtttctaagtttcttgtcccaatcccagaacaagggaacttgatgattctcccttcggagaagggggaaaaaaaaaacaaaaacaaaaaacccaagtcgagctttgttttctctttttgaattattttggtcattatttcaaacacacactttataaacccgagtgtagattcaatgcaactataggaaaaacttattcttttggtggcagtagtgtgtgtgtgtgtgtgtgtgtgtgtgtgtgtgtgtgtgtgtaacccagagacacttaggcttgttctccatcactaagcaacgttcccagctactctgagacatccttaataaacgatgagctgtggcatcccctgggaaagcgacctctagctgtgtcctgtacaacggaatgaggaaagagcccacagcaaggacatctattagcaaaggactgtttactgtgagcatgtgtggatttacagtataggaatgcacgcagcggtaaaagccgaagaccttccaggctcctccctcttccccactcatctggtctccacctcctccctgccacctccttctcactccaaatcttccctcctaggtaggtagtgtctgggagcttcctggaggtgatatccagagtcccaacgctgtggagttcttgcagcggcagagagacagttgcaccgcccggctcagggttgctgggaggacctgaagcgcttggccgcacgctgcagtttgctagtgccggaggagggggttggaactgagagacctctgagcgccacgccgggtggggcagggaaatttatggtgtgtatacactttctggctccagagccctgagcacaagaaagcccgaagccctgggagttccaggccctaagttggggcggcggcgggagccaccgccacctaccacctatggtgtccaaccagagctttccattctgtcactttgcaattaccctcttggagggaaggctgaaaaactacattccaggcgagaagtggtcgcacactgcacagccctgctgctccgggacaagctagggaaccggaacagtggtccttcctggggagaggggcttgtcggtactggctgcagttgggtactgcggtgtcagggtggaactctaggcccagcgactggccgcatggtccacagtgaagacaggttaccaggcctggaatgtaaggcccttgctgttttcctattaagatcgtgttgagacctagacttgagaggctgcctggaccacacagacgcaattctcattcgtggtttcagtaaagaataacccaaaaaatcagggaaggtgcgaaaactccgtgggccttcgtgggacagaggcttgagaatcgggtctgggccagaagctcgtttgagaccatagaggtcccatttcatttggccagactgattttggaaagccagcccagtgtggttcccgatcgctgccggcactccagttattccatcacagtaactgcacgcactaaattgggatgtcagctcgcggtagacttctttatgcacactgccctaaagatggtgtggcggcagtaaagccccctacggttgaatttacagtaccagtcacggctttcaatttgttcgaaatgaagtgttgcgtgcctatgtgctgggcactgttctaaacttatatttcaatgatgtgattacttttattgccctcgtttaacggataggtaaattagactaagacagttaaatgaacttgcggacagacgcaaagtaagtggaaccgggaagagatcgtatctgtctctctgtctctttgtctctctctacctctgtgtctgtctctctcctgcccaggttacctaagtcttccacagtaataatgaaacaactacttctgccaactgttactaagactcaagcaggcgacaaggagctgaattacagaagcgctagggttgctttaattattcaggtcactctgctcagggggcagcgagcttcttggctctagcgctgggagttctgagcttagagggtcagccaacgcaggtggtcctgcagataaagcgaagctgtttagcaattacccccggggcgtgctaattgagtctgcctgacaccagctttgcgctctcccttcgctttgatttactgttggggtcaggcctttgcgtccaattgcactacaggaactcggcttgcttgaagcgagcgctcaggatgcccacggccacacagctccaaaactatacccgaattttctattttctatcttttctcggatgtcatttagtttttctcacgtagcccagtctggcctcggacttgttttgcatccaaggattggcttagaacttttgatccctttgtctccaccactcaccgaagtgctgggatttcaagcaagccaggtttatgctgagctgggagtggggcccagtcgatttttaatttcttaatgtctttactctgcgtgaggcaggtggcgagttgcctacctgtttggctgctcctggaaacttttcttggggtaatggggtacaacttggagctggcgatttatttggggcaagtgctaggggaatagggtgaaggttatgagggaacggtgggaaagaagaggaagggaaattagggaggaggaaatcataacaataggtgggattttgaagcgtttctcacagagcggcggagttgatacactgttcggctgggccataaattaatagatttatccctcaatcagggagaagcagttaagatattcttggcttcgtctgtgggaaaacaattcctttgattaagttgccccagaagacctcgtgaagccctcactgacgggccttgagaggacttccctttcctgtctgctggaaggaggagagcaaggtgagactccagggagaatgcctttccttattgtccaacagtttgattttgacttgaggagcttactactgtttctcagtttgatctcctccctcaggatttggggactcagtgggctgagtctccacagccagccctgccctccttccctccagcagaccgtaaggacccagagtgaacacttggcctctctgtgttccgccatgcacctggcattggtgaaccagggccgcggtggtggccaaagtagacaaagtggaaggagacatcccctacagggagggtgacagaccccccccccaggaacttggcagagaacagctctgtcaggcccccaagactcacagtgtggtctctgcccctcccccatcctttcagaggatccctgaggtcaaaattattttcacagtaaaaggttattgccttttccacaagtctcccaggggccacgtttgtagtggtgacatcataatgcgtacattaaaatgttttacaaacgtttcagttttttttttaaattttactttggtaaaatgctttttagaaataggttttcatattgcagtatacctgttgtaggactgttcagatttactttaacacgaaatgaaaaatggatttttgtcaactacggctgccatatttgaattgctccatagccccgtgctatggacatagtgtttgctaccatagcattctactgctaacaatgtataaaagtagatacaaccacacaaacaccaggtacaatctcacactgagaggcagaggcagtcagatgaggaatttgagatctgggctacatggttagtctgaggttaacctggggtaccctagagagatcggtttcagacaagcatgtcatgaaaacaaggacaaaaacaaacctcttagtatccactgtcacttttacagacattctgaggtcagtgaagttcaagaccctcacttcggagtttccttctagcggaggaaagaggctgtggggattgttctaaacttactgtggttgtaagcgtggactgcttttgttactttgtaatcgtggactgcttttgttactttgaattctaagcttcggtccagtcttgttttgaaattgaaactaaatctttttcatacaatatattctgatcacaatttctcctccccctcttctcccagattgtccccactaatccactttttagaaaaaaatccaaacaaaccagaatagaacaaaataaacagagaaaacaaaaaaatgaagaaaaaatatgagaagcacatacacaggctctagagaacatgcccacatagaaaacccatacaaacataatatctgaaaccatgcactcgggcgcacacgtgcacacacacacacacacacacacacacacacacacagacacacagacacacacacacacacacacacacagacacacacacacttgtacatgtgaaaaagatcagtaatatttaaaaaaattctcaaaatgccactgggtttgtttttgggggctttgctatctattgctgggcatggggcctgttgttgagtgtggactgtgtacgcagggagatgccattggagaaaactgatttttcctttttgagaggttgtcagttggggataaccaagcttctgtaaatatgaccaaaataggggactggagaaatggctgagtggctaagagcacctacttctgttcccaaggacccaagtttagttcccagaacccatggcagacaattcacagctccagggacttcagtctcctctggcccctgagggcactgcattcatacctacatataaacataataaaaaaaaactctaaaaaatgaggaagtaggaacagtagtaatactaatagcaccttcttttgggttgttgtgagggacacattacgtaactaagtaaaatagtaaccatccctttgtttagacagaacccacattagctgttactacatacataaagggtgacaataaggtgtacccatatagtttagcattgttaagggagtcacattatagtgtaacaatattcagaacatttttatttgtcaaagctggaactcttccattaaaaagcctcataagccaggtgtggtggtccactggggccagcttggtctacaaagtgaattccaggtcagctaggaatccaaaaccaaaaccaaccaagcaaacaaaactacccatatgggatgcccatgaggcccccacccctcacaggggcactgtggatggttaatgggtatgtggggggtatagggaatgggggcggggttcgggggatgagggggtgggagtggggaatgggagttggggggaacctataaaggaccaaactaggtcctctgactgttggtgatagttgtgtggctcgggcaatttgtctggtcactggtagtgggaccaggatttgtccctagttcttgagctggctttttggagcccattccctatggagagataccttgctcagcctggattcaggggaaagggccttggtcctgacccaaatgatgtgacagactttgctctccccgtcggaagcctcaccctctctgaggagtggataggggatggggtatgggggatgtagggggggtgagaggagggaagggagtgggaactgggattgatacgtaaaatgagaaaagattgttttaaaataaaaaaaaatgctgaaaaaagaatcaaaattagtctcttaaagtagctggagtagttggcaaagaacagccagatgctaatgatgtaatcaggtctcaccctttccctgaagtgctgagcagacccttgggtggctttggggtaaccgctaatcttgggtctagagaggaagtgatggttgatgaggtgggtcactgtgtcaccacgagaagaggggtggggagagagggagagagactagttcaggagacagtaaatcagctgtggtggaagatgagaaatgtctccacaggctcaggtctttgggcatgtgattcccagtagggggtgctgtttcaggccttcatggaagctttaggtggtgcaggctggctggaggaagaatgtcaccatgtcaccgaggatgggctttaagggattgtagcatcactctactgtcagttcactctgctttgtttgcagttcaagaaatgattcctctcagctttctgcttcctgctcaccgtgttttatcacaacagaaaaaagtaacaaatacactaattcctttgctgtggttgctggagagcttgaagatcctatctgctgggtaatttgctgcaaatgtccaggggtaaggcatggatttggggtatgaaaatcaattttgcatcctctcccttcttgtgtccgaactctgctccttttcttccttccttgcttctcttgctttattttaaatcatgtctttgtgtcctcatgtggttcctactgaggccagaagagggcatccagtcacctggaactggagctacaggtggctgtgagctgtttgatgtgggtgctgggaactgaactcaggtcttctgtaggagcaacactgcttttaaaccacagggctacctctccagccctagctgtctcctgcttccttcctcccttcctctcctctctctccctttctcttttggtttctgtggtacagggtctcagagagttcaggctggcctggaactcactttgtagcccaggctggcctggaactccccatcccaaaggctggtatcactggcatgcatcaacatgctcagtttctcattttccctttctcactgggcacattttattgtaccatttaagtattagatcacacattctttctgcaaacaaagtagacgacaatagatgcaattctggcaggaagtaggagacacattccgtgggtcgttttgaaggagctttgatggactatttctggaagtgaggaagccaccaagaggtgttcccactagtaacttcaggctggggaggggtattgggctactgccccaaattagcatcgacctagtgacttaaaacttcatagcattatttgctcagcattctggaggccagaagtctgaaatgagtttctcagggtgaagacacagtgatgacagggatggatccttctggatgtcccaaggggagaaaggtgctgtgtaacttcaggctgctgctgatattccttggtttatgtccttgccactccaatcctggtttctctggtgacacagacttctgttctgcatcgaagtttcttctgccttcctcgagcgtgtgtgtgtgtgtgtgtgtgtgtgtgtgagtgtgtgtgtgttgtgtgtgtgtgtgtgtggtgtgtggtgtgtgtgtgtgtgtgtgtgtggtgtgtgtgtgtgtgtgtgtgtgtgtgtgtgtgtgtgtgtgtgtgtgtgtgtgtgtgtgtgtgtgtgtgtgtgtgtgtgtggtgtgtgtgtgtgtgtgtgtgtgtgtgtgtgtgtgtgtggtgtgtgtgtgtgtgtgtgtgtgtgtgtgtgtgtgtgtgtgtgtgtgtgtgtgtgtgtgtgtgtgtgtgtgtgtgtgtgtgtgtgtgtgtgtgtgtgtgtgtgtgtgtgtgtgtgtgtgtgtgtggtgtgtgtgtgtgtgtgtgtgtgtgtgtgtggtgtgtgtgtgtgtgtgtgtgtgtgtgtgtgtgtgtgtgtgtgtgtgtgtgtgtgtgtgtgtgtgtgtgtggtgtgtgtgtgtgtgtgtgtgtgtgtgtgtgtgtgtgtgtgtgtgtgtgttgtgtgtgtgtgtgtgtgtgtgtgtgtgtgtgtgtgtgtgtgtgtggtgtgtgtgtgtatgtgtgtgtgtgtggtgtgtgtgtgtgtgtgtgtgtgtgtgtgtgtgtgtgtgtgtgtgtgtgtgtgtgtgtgtgtgtgtgtgtgtgtgtgtgtgtgtgtgtgtgtgtgtgtgtgtgtgtgtgtgtgtgtgtgtgtgtgtgtgtgtgtgtgtgtgtgtgtgtgtgtgtgtgtgtgtgtgtgtgtgtgtgtgtgtgtgtgtgtgtggtgtgtgtgtgtgtgtgtgtgtgtgtgtgtgtgtgtgtgtgtgtgtgtgtgtgtatgtgtgtgtggtgtgtgtgtgtgtgtgtgtgtgtgtgtgtgtgtgtgtgtgtgtgtgtgtgtgtgtgtgtatgtgtgtgtgtgtgtgtgtgtgtgtgtgtgtgtgtgtgtgtgtgtgtgtgtgtggtgtgtgtgtgtatgtgtgtgtgtgtggtgtgtgtgtggtgtgtggtgtgtgtgtgtgtggtgtgtgtgtgtgtgtgtgtgtgtgtgtgtgtgtgtgtatgtgtgtgtgtgtgtggtgtgtgtgtgtggtgtgtgtgtatgtgtgtgtgtgtgtgtgtgtgtgtgtgtgtgtgtgtgtgtgtgtgtgtgtgtgtgtgtgtgtgtgtgtgtgtgtgtgtgtgtgtgtgtgtgtgtgtgtgtgtgtgtgtgtgtgtgtgtgtgtgtgtgtgtgtgtgtgtgtgtgtgtgtgtgtgtgtgtgtgtgtgtgtgtgtgtgtgtgtgtgtgtgtgtgtgtgtgtgtgtgtgtgtgtgtgtgtgtgtgtgtgtgtgtgtgtgtgtgtgtgtgtgtgtgtgtgtgtgtgtgtgtgtgtgtgtgtgtgtgtgtgtgtgtgtgtgtgtgtgtgtgtgtgtgtgtgtgtgtgtgtgtgtgtgtgtgtgtgtgtgtgtgtgtgtgtgtgtgtgtgtggtgtgtgtgtgtgtgtgtgtgttgtgtgtgtgtgtgtgtgtgtgtgtgtgtgtgtgtgtgtgtgtgtgtgtgtgtgtgtgtggtgtgtgtgtgtgtgtgtgtgtgtgtgttggtgtgtgtgtgtgtgtgtgtgtgtgtgtggtgtgtgtgtgtgtgtgtgtgtgtgtgtgtgtgtgtgtgtgtgtgtggtgtgtgtgtgtgtgtgtgtgtgtgtgtgtgtgtgtgtgtgtgtgtgtgtgtgtgtgtgtgtgtgtggtgtgtgtgtgtgtgtgtgtgtgtgtgtgtgtgtgtggtgtgtgtgtggtgtgtgtgtgtgtgtgtgtgtggtgtgtgtggtgtgtgtggtgtgtgtgtgtgtgtgtgtgtgtgtgtgtgtgtgtgtgtggtgtgttgtgtgtggtgtgtggtgtgtgtggtgtgtgtgtgtgtgtgtggtgtgtgtgtgtgtgtgtgtgtgtgtgtgtgtgtgtgtgtgtgtgtgtgtgtgtgtgtgtgtgtgtgtggtgtgtgtgtgtgtgtgtgtgtgtgtgtgtgtgtgttgtgtgtgtgttgtgtgtgtgtgtgtgtgtgtgtgtgtgtgtgtgtgtgtgtgtgtgtgtgtgtgtgtgtgtgtgtgtgtgtgtgtgtgtgtgtgtgtgtgtgtgtgtgtgtgtgtgtggtgtgtggtgtgtgtgtgtgtgtgtggtgtgtgtgtgtgtgtgtgtgtgtgtgtgtatgtgtgtgtgtggtgtgtgtatgtgtgtgtgtgtgtgtgtgtgtgtgtgtgtgttgtgtgtggtgtgtgtgtggtgtgtgtggtgtgtgtgtgtccatgcatgtacatacacatgtgcacatgtgtgtcaacctcgggtgttagctttagaaactgtgtcttatattgtcatttattattaatttttggtatgtatgtgctatatgtgtgcacagtgtatgcacgtgggtgtgtgtgcgtgtgtgcgtgtgcgtgtgcccgtgtatgcttggtgtgctgtccagctactctctgcattattctcttgagacagggtgtctcactgaacccagagctatgccagcagccagtaagctgcagggaccctcttgtctccatgctccacagtgccacatctggattttttatttttactttttaatgtggatacttgggatctgaatccaggtactgatgtttgcatagcaggtgttcttacccattgagccatatttccagccttcttgttattggaaaaaggtgtctcattggcctggggttcacccattaggactggccaagaagcctcaaagatccccttgcctttctctccctggtgctggacttacaggtgtgtgccagcacacttggtttctaacatggatttcaagacccaagcttaggccctcaggcttcacaacaggcattttgcccactatcttatctctccagccccatgccttctgtaagtagatttgtgctttcatttagcaccaacatagtcctctggcatcagctcctcctatctcagggactttaacttaatcacatctgagctctcttttgccacatacgattaccgggattaggaatgtgctaattagttctgtcacttgacacagtctagagacacctcaggagagggaatctcagttgagaagatgcctccatcagatgggcctgtgggcaagcctgtggagcattttcttgattgctgattgatgtaggagcgcccagcctattgtgggtggggccatccctgtgggcttgaattgtataaagaaagtagccgaacaggccagagggaagactagtaaatacatttctccacggtatctgcttcagttcctgtcgcctagttcctgcttgagtttctgacctggctgttcttggaaatagaatctgtaagccgagcaacctttttccctctcaaaccatgtttggccagggtttatcacagcaaccttctagccatttttggtcacagcaatagaccccaaagtaggacaacggactgcttatctttggagactgttactcagcttatcattctaagtatggggctgcagtagcccacatttgagggcagagggtatctcttgctccagtctctgaccagtgaatcttgacaactatgcatgaagatgaggcccactgaagccatttttctggaaaccaagcaaggcagaaaagagcagagaacggatgagagggaaatcagtgagcagatggcatccctgccagctactgcgaagcaccgggcaattgcagcccttgaggtgagcagtgtttctcaggggaggtgctgcagttgcacagtgttttcatgcacccttaggcttcggttcttccagctaagaggagatgggatgagagatgtagacacagttcagtccaggctttgggtttctctttcttatcctctgtgacttagcctaaagtgcagaagagctgtttggctgacctgaacaggactgaagagtgaaacagcagcagccctgggtctccacgagaaggttccagttccaaacaatttcacacaatccccccgcccccaccatctcatcttcagctgccccacactgttcttgagacttgcattggcattttgataccttgcacagcctagctgtcatttctacagtgacagttaaaaccgtgcttggatcaacaagggacaggaacctggctcggtaggtgggtgagcctactgggtggctgcagcccgagcagccctcagtcctcagccactttttccttcctgccacttcctacaaggtgttctttctccatccccagggccacctatcagccaggcccacagctttgcatccctcctaatccctctccccagcttctgtctctagcagagtcttgtgagtcttttcctagcaaaatgggcgagattgacctcaggtgttttgagtaatacccatgtccaaattcttaccttctaatgacgtctctgacatattgttttattgacatttgaaactaaagacaaaaccagctgcttctcgagggaggtgggaagcgaaacatgaaaagaatcttccaaataaccactgctcctaccccgcccaaaccaaaccaataaaaatgagtctagccaataattcaacccccacatctcccattccctgtgactaagggctgcagaggcagcacagcggggactcctcattgctgaggagtttatcaccaggagttttattaggtttaatgtagccaaccggggcttctgagagtattctttcctccccagggacgtttttccctctaaggacaaatgtcctacagaactgacacctaactgtctttataacccagtgtagcttggttgattggcaaacctttcacaaatgccatcacaggagaaggatcccacagtctgcaggaatttgtcacttgtacctttctttcagaaatgccccagggcttaaagcatagcagctctaattattgtaataaccctccagagggggagactcatctgtcatggttgaaagtgatttcttgttttagtgggaaagctttaaaaatgtcttgtttggacccagattgtcatccattaattggtaatttaagcaagttacttaaagccaggcaattaggttaatgagagcgcaggccctttgaagttgagcaggcatggagatgagctcagcgctctttagaaagacattaaatcaatttggtgtgaaaggcagaggggcatagtcctctcctacagtttcagggaaagatcatgcacatgcaaatttctcctgaagcatggaaattatagtggtgggcccctcaggcatcctggcagtcaccctaccatcgaggaagaaacagcagctgtcccaactccatcactgggaaggatgacaggcccggattaggccttgcacagaggccagggactcttgaagaagccaggcagacacaacagaaccacagacacacagaacaccttgaacttggacagatgggattgctgatgaatgggttgaaatggtagaggtccctccagtgggagccagctggatttacctggagctgttccacggagggacaatttcagagtagccaggctgcctttagatattagtcagagatattcatagtgccatcagtcaccctgcagaggacagtgtcaaatatcttcatgaagtatttccctgcttatccagacaccagagtcagccatcttgttgatgaatgactcaggttgaattgagtggggatcaggccggccagacttgtgttcatagggcaagagtcattatatcataagcgggctgtgcagcagagcctatatgcacaggctcacatggtcatagtctatttttgaaggcaattatctggaaatggggctcagaggtggcaaaggatggaggcaagtgatgagggactctagaggcctgagctctgtcatgcagaccagccttagccaagttcacttatggaagtcatccagccactacttatggatggacataagtcagaaattgtagatctgacagtgatatgaaagggatacgtgatctaacagtttgggaagaaacaggccactagcagatctagcagaaacaggccactttggtcaagctgggtttagataaaggtatgtctctctcagcaattcgtaacgagtgagttcacatcattgtatttaagggaattattattgctattcaaaacaagcttgattttgaagtctgctgttgggatactgtcgagtctgtgttcccgttggtgacacctctcatgcatttcggaatatgtcttctctgctcagcctctagtgttggggatttagaattctctttcataatgcagactgaagggggtgcagagggaaacctttgttttttttttaaaggtttatttatttattatgttcttgtttgcatgtgtccctgaaggccagaagagggcaccagttctcattatggatctttgtgagccatcatgtggttgctgggaattgaactcaggacctctggaagagcagccagtgctcttaacctctgagccatctctccagcccaaaccttgatgatgatgatgatgatgatgatgatgatgatgattattattattattattattattattattattattattttggtttttcgagacagggtttctctgtggctttggaggctgtcctggaggctggtctccaactcacagagatctgcctacctctgcctcccaagtgctgggattaaaggcatgcaccaccacctcccggctccaaaccttgattttttagcatctttgtagagctccatcaaaagagaatcaagctgggcttctgtttttggggaatctggtgctgcttaatagattgcactagaaatgctatactggttggctctacatttttagatcctccctccttcctcctcaagatgtcagtgttttttcttttgtattcctgggttttgttgggtgtcccagtgggcatctgcattatgatctgatgaggagagttagtcagacccgccttttgttgttgtcagaaaatcagtgagttgagcctctctttcaagtcattgggtttatgatacaattgtgtgctgtcttggtctgtcctggacagcttgctattaaagcacacggttgagttgtggaggcggtccatcgcacagcagcacactcaaagtgaggtgtggagtacgccacatccagaagctctataatttcagaggaggtacagatgcaatggccaatgtcagcctcgagtaacaccctgccaggtatcattgtattcaacaactggcctggccagagacaaagtcatgtcagagcgaagacggatactcctcttcgaaattctttcatttctaggccacttagaaccatttgggccaggatttggggtattcaactctgtttatattatggaccattcatacatgttgatcacatacggtatctaggaagcaaaaattggtaaaagaatttgtgtgacctcagagaacctgaccggaccctgaggcaggtaaggggtaggattataatgcaccagcacacgctaggagcttgaggaagtcatcaggtgttgtggtgagtgacagggaaggcctatcggaaggtgtcatgatctgtgcagtaccttctaggcaggatacacatcttcaaaggtctggaagaaagagtttgtggtgcatcctataatggagagtaaggggtggtgtatacggagaaaccatcacatcagttctctcccagaccaggaagtggaaacaggggagcacaattcagatttagatatcgagtggtccatcaagatggaccacacaaaactgccttcaagtgtgcccctcccatgactcatgtgcctaaggagacagatttctaccctttctaaggctgggcaatgagggagtgctcatggttagagtggccccacacctccatgttttctcttccagtccttctgtgagtataagacctaaaagcctaacaggctatgctgggataaaaccaggagttgacattattgttgagatttccaagaccttccttctttggtaccctggcttccccctagtttttcctcctgtccagcacgctcacatcctttcctcttttgatcttgcccagtgagacatacttctcacaggaagtttgtcttcattacttgtacccatcatcctggactctccaccacccctacccctgcctctgcccatgcatgaggtttacgtctggggctttcagtcactactgactttgtttttatgttcctcacagctgaggttgtatgtctaccttgcctgccacttatgcagttgtgagacccgtatgccaggctgtggttgtttctgagtgggccatgtcggaggaaaaatgagaagagttggcttttctttgggtgtcttggaacagcagctgatttagtcatcagctatcccccacaggaggcagatgtcacagtgtcagttgtccacctgacacatctgggaagaaggacccttccacccattgaggaattgtctccattagattgacttgtgggcgtgtctgtggggcattttcttgactgctaattaaagtaggcgggcctagctcactgtgagcaggtaaatccctgagcagctgggtatgcaaaggctaagaagtcagtatgcagctttcctccatggtctgtgtttcagttcctgtctccaggttcctgccttggcatcagttgaggtcttcagtgatggactgtaacctgcaagctaaacaaatcctttcttcctcaagttatttttggtcacagtattttagcacagcaacaaagaagcaaatggatatacagatgtcactattttcattttatagttgaggaaggtgaatgtggaatgtgtgaaagcaactcccaaacttaccaaccttcatgacaaaactggagttggaatcaggcccaagctctttagattggcgttgaagatgaaggcaacgcatattattctacacaacgaaagacaataatgaactcagccatcactccacagccactgccctagctccatctcagccataatttagtatcttcctcaatgactattggattatagtaattaacagatttgcatatttgaaaatccataccaaaaggctcttgaaagaaaaaaattgaaattttaagaatcaggcatttgacaacgtatatttcccaactcacaagttagtcataatttctattgttagctaattttccacattgctttactttgagagagaaattaatttttttccttccgatggcttgggagctgggatctgggttgtagagctagtttagaatctggatagttttttttttttttttaaagattttatttattatgtatacaacactctgcctccatgcatatccgcacaccagaagagggcaccagggatggttgtgagccaccatatggttgctgggaattgaactcaggacccttggaagagcagtcgatactcttaacctctgagccatctctccagcccctagaatctggatagtttttaaagtgtgtcttttctctcccctactgtcccatatgggacactggcataatggttgttcacatcctcttctatgatctggctggttacttggcaattgagtggctaccactcagctcatcaacagacatggagacgggcaacacggggcactgccctgatgggggtttgcttatgccatgttttcaccatcagaagcatggtctagtggagctcacttcttccttatagatactttacttgtgtggatattttatatgggtctcctcagccagttttcttgactttgtttccatggacacattatttctcttgtgaaggtctccctcaaatctgtggttctttttaaagcagggaggttaggtgctcatgctgcgctcctttgtagcccgtctttcatcctgcagtggagcctgtcaccccgatctcctccccgtctttcggtaggtgccagtcctctgactttttcatagggacttctgaggtgatcaaggaggatggatcatcacatggaagcgcctcaccaactatctgccgggagccggatcttcacagtggagtgtcggcagaagcaggtcatgacgctctccgctcacatgtgggggccatgggtgaatgcgtgtgtcaccaaacaccatggcttctgcttgggctgtggggagcctgagggaggtaatatcagtgctaggcctcagaggatgagcaagagtcctgataggtgcataaaatggggcagggttttaggtcgcttgggaagtctaaatgaagcctgggggttggcctgggtctttctgtcatgagaggcagttgggcaaaagttgatgtagattataaatttgttttattttctctccggagttagaccattttgcagtaagacattaatcagagaggaactattatgcatgaaatagctggggtttcaggtccccctggttgcttcttggcacagtgttaaggggaacacttttagttgatgaaacacgggagactaatttggcagttctggctgagctatagcttcctccttgaccaaacttcttcccaaggcttgtgtctaaccttcctcagcctttataggttcctgctgctctcttaggaaagatgtggaaggtaccagtgagagtaccattctgtagctgaagggacagcggagagtgccactgtccttcagcagagacaacaaagccagggctttgatttcctccccctcccccctttcattctttctcttgctcgccttccttcctttcattccttctttctagagaagttggtttcacgatgtagcccaggctgcccttaaagccacattcctcctgtctcagcttccagtgcagggattgcagatttgtgacactacaccttggttttgtaagattctagaaattttgtaagatttcttgtaagaaaatacaagagtattttcacagggcattggaggtataagcttttttttttttttatcagttttatgaacaagatttatccagaaaggttactgataatgcactgagagtatgactgtaaattatatatatatatatatatatatatatatatatatatatatgatactataatgtgtgtgagtggcatgtatacatgccaccgaccgtgtgtggaagtcagatgacaactttcaggaggcattttccttctttcaccttgctgatgcaggaccccctcctgtttttgttgccatgtgttctcctggctagctagcctgtgtgtttctggtgactctgccacctcccatcttgaagtagggatgctgagattacagaagtgtgctaccatatttggcattatgcaaccatttatttgtttattgtttgtgtgtagagcagtatcatcatgtatgtgtggaggtcagatgaaaacttgtggggattatttatctccttccagaatgcctggggataaactcaggtcatcaagctttgcagcaagtgttttatttgctcacatctggctttttctttttaacatgaggtttggcattcaaggcaggttgtcaagctttcaaggcaagtgcctttgctgactgaagagtactgctgacaattttcaagagtatgtgagtgggtgctataatgtgactggaagtcctcttatgttgccagttttatgacacttggacaagagagagtctgattggttttttttttttttttttctgacacaaaaccattgattttgattataaaaacaatacatgtaccaatcagagcacttagaaactgcagagtggagtttatagtaacatgtttgagttacttcctgccttgtctgtgttgcttcttcgcatccaccacaggggggtgtctgctggaagatttgctctgcaagagcactgcatagataagccgtcattggtgacagaaggttcggttaattcctctggtttttttttttttgttttgttttgttttgttttgttttgttttttgttttttgttttttgttttcaactggagtgttagggatcaaacccagagctttgggtatgcatgcagataccttatcactgggctgtatctctagccaattgttttctgagacaaggcctcactccataggccaggctggcctggacctcacagtccttctactcctgtgaaattcctaaatgctgagataacaactgtgagccaccatgcctggctgggttaatttgttcggcaattctccttcataatgctgaaatagtcacatttagagatcaatctttgtattcctattagaaatatggtcctaggatgggttctacagaataagatatgatggctcaaaggtgtcttggggtttctgtgaatttttcttctctcactggagcttatgttgattgtcagcttgctggggctgagaagctggtttctgggtacatctgtgagaaccttccagagaggactatttaaggggaagaaacccacagactgtgggtggcccctctggtatcctggagatctggatggagtagagagggagaaggacaaagccactggaccaggcatctgtttgctcctttcatcctggctgccacaacgtgaggtgttccgctccttctggggctgtgaagggggcacccagtgctccccttttctttagatggtttctcccaggtgtgtgtggtcaggtgatgggaaagctggcaagcaccaaggaaacctctcttaattctttctgtggctggtgctgagggttccccctctcttcggcttagctgcactcccagctccctcatttcagtttgaatgtctttgtcatcagcagtgttgactgattgttcagtagtttttttcttgggtcaattaaaaagttttaaatatattttggtgtgtgtgtgtgtgtgtgtgtgtgtgtgtttgccagtgtgtggaggtcaaagaacaacttgtgggagttggttctctctatccactatgtgggtcctagggattgaactcaggttttgaggcccccttactggctaagccatattgctggccccctttagtcagttttgagctaaaatattcttctcattctagaaaaagatttattagattttattctatgtgtatgagtgttttgcctacatgtatgtatgtgggctgcatgggtgcctggtgcccatggaggccagatctctggaaactggagccttgaattaacagagatccttctgtcttctgactgctgggattaaaggtgtgcaccaccactgcctggcctctatggctaactagtgtgactagctatgcacgctgatcttcaggcaagctttatttgttagttcataaacaaagtatcaccacaaggtgctcttagccttcagccatctctctagcccatctttacagtttaaaataattcaataatcatttacttcattgtatagttgcatgccattcatcttggacttaagtgatcagactgatataatcatttcaaatagttactggaatattccatcatttatgggggaattgtctccccttcactgattgcagatgtcactctcagtgactattttgtaagcaggaaaataccttcactgtcaacacgcattaccgactaatccaactttatgaaaaatactgaggttggcaatacacacacatacacacagttagaaggaaatcagacaatgggaatgcagaaccaagcagcaaatcaaatgttaacaaacacacattcttgtttactttccttcttttgagacactcacactgggctgtttgttaggagtatagtctttttcttcatttactctataaattatttatttatttttggtacaggggctgaacctaggccctgtgtatactaaaccagtcctctgctatggaggtgtagcctcagctcctggaaatgtatttattcaggggccttttgtggactaaatcccagcacacacaaaaataagttgtggtgtctgcccttgggtttctcagtccaaggggaagtatattagctgggaatgactgggtttcagcaatacaccgaacaacaccctataagtacgcatttgcactaattcagaagcttgaagattacaaggctctcagctgttgtgttcatgtcatttttttcattgttccagaaaagctttgtttgctacagtcttcatatcttcatatacacatgcatacaaacacacacacacagatacacacacatacacacacacacagatacacacacatacacacacacacacagatacacacacatacacacacacacagatacacacacatacagatacacacacatacagatacacacacatacagatacacacacatatacatacacacacacacacacatacacacacacacacacacatacacacacacagatacacacacatacagatacacacacatacagatacacacacatacagatacacacacatacagatacacacacatatacatacacacacacacacacacacctacacacacacacctacacacacacacatacagagacacacacatacagagacacacacacacatacagatacacacacacatacagatacacacacacacctacagatacacacacacacctacagatacacacacacacctacagatacacacacacacctacagatacacacacacacctacagatacacacacacacctacagatacacacacacacctacagatacacacacatacatacgaatacacacacatacaggaaaagtgaggggcagcgggcagtgcagggcaagcacgacaccctccttttatcctgtaggaaatttccctggaaactatgtagtggaatcctctcttgtctcacaggtcagaatgagtcacgtccatctttggaccagagattgggcacatttcctgagactgaggcacctctgattcactctgagcaaaatggtttatgaataaggaaaggggacctgtaacttttaattttagctaatttatgtgtatatctttatgttgtatttctgtctctgcgtataagtgtgtgtgtctctgcgtgtgtatctctctatgtgtatctttgtatctctctgtgtatatctttatgtgtgtatttctgtctctgtgcatctgtgtgtgtgtgtgtgtgtgtgtatctctgtgtatcagtgtgtgtgtatctatgtgtgtatttctctctgtgtatcagtgtgtgtgtgtgtgtgtgtatctctgttatctctgtgtgcatctctctgtgtgtatcagtgtgtatctctatgtgtgcatctctctctctctgtaccagtgtgtatctctatgtgtgcatctctctctctgtgtacctgtatgtgtatgtatctgtgtggtggtcagaagtcaaccttaggcgtcattcttcagactactcagtgctccctttacatttttgagattgggtctctcactgactgtaataaataaaagacccagggacagatattggggttcaagcttcaagctgaagatcagagaaatgaagtggctggccactagctcttacctctagctcaggctgaaagggctgatcctgcctccatgagctctcaccaagcctcagactgctgcctctcctcagcatggtggtgaatcaatgcttgataaggactcctgaagaccctgatcctatctttcatacctatttatgctgggatcaaaggcatgagctctgttactcttttagattgattcaatctcgtgtagccctgggtggctttgaactcagatccatctgcctttgtctcctgagtcctgggattaaaggagtgtgccaccactgcctggctaactagtatggctgctttgctattttgatctccagtggctttaataaatcatagacaatgtaccaccgcaactgacgtggaactcctgaatttggttagtccagttggccagtatcccccaggggtccatctgtctctgcctcccctgagctaccacgcctagcctttttaaggtgagctctgaggactaaactccggtccccacacttgcatggcaagcactttgcaggctgaagtgtctccctgggttgaccagtgacttttgagcaggtatgctataggtctattgtcaagagacaccggctcacacagatgcatatagagtgagtcaaacactcacaagggattctaaggtatgtccggcttcctatgaccccagcgggagccaactcttgttgtctctggtttctctcttgtaaactggagatcgtcctcactgacagctgagagaatgcccttcaaaactcaagtcatcaaacatggatacctctccattttatcatgtttgggatggtgtataaggttccccaattgaaaagtttgccctgttcagtgtgggcttcagaactcttctggcatgaggcaggccatggaaagcacatggagtcctgtccatgggtcctgagccagaccaggagttgggacagtggtggctttctttttttactgtgctttgcacttgggaacaagatttttcactgttgaaatttgtcaaatcaattttactttatttttattagtgtgtgtatgtgtgtgtgtatgtatgtatgtatgtgggggacatgtacatgctatggctttccaatgggggttggaaaggatttttctccttccaccttgtttgaggcagagtctctcacttctgtctgtatctgcactgtgtacggccatctatatggccaggggagcttccaggtgatgctcaggcctctcccgctcgctctaggagagctggggttacatatgcttgctttcaaatatgactcttacatggattccagggattgaattcaggctatcaggcttgcaaggcagttgtttttcctgctgagccatctcatgacactgccgatggaatttctcacatgggtacctaggtcctaccaaaagtatctgtggaggatgcttgcaaccaggaatgatgaattctcatttttttttttttatacctgatggtattgtgtttcccggagattgggtgggtacactagacattttcatagaacattcttcctcagattagtttttaaaattacttttcttgtcttttatttttatgtatatgtgtgagcttatgtgccccataggcatgcgggatcctgtggagcaatacagagcatcagagcctctggaactggaattacaaacagttgtgagctgtcatgtgggtgctgggaattgaacctgggtcctctggaagatcagacaatgctcttaagtcctaagccatctcttcagccctgtcttcctcagattcgagaggtagaagactctcttcccttcaaagcaaaggacggtagctcactcagccttgcaaaggagttgagttggtcaggaggaaaattgactttgttgaaatgggtggtaggtcggtaagggcgggactcaaacggagacctcagcgattaagttcaaccgtttcctttttgtgggcatagaagagaagtatttctgactttgtcctgaccttttcaactttagcctgcttgtttagctggtcacagcgccagttcctcttctacccacagaagttcctttgctttctgctggagacgtaaagccccaccatcacccacttctggcagagaccccttcgcaaactttgcttgaacctgggtccacattgacccaacttgcttccatgcacgaggcagcttggtaaacagcgggctccgggtgcagtcactaaacttgtcatttgtaccccgtgctctttctatcttcctcacctgtccatttaaattaagttgccatcagtctcttccccactgggggaagattaacgagccttcatctgtccccgttcgagcacacgcaatcgtcacgtcctgaagagagaggtggtggcaaataaattatgggctgtcatcgtagaggatgatggggcatctccagagtgcttctctattcacaggctctgagttgggcaggcatggggtcagcactcatggatgtgatgtctctgagaggctgggaccatgggaagtggagcatttagtaagtcttcagggagtccgctcccagaatggtagcttctgactcagttcagttactttgtctctcactcataaatccataactagaatcccaaagctgcagaagtttggatagaatgtgcatagtaccatgttctgaggagtttgggaccttcaataagtcatttcacttgatttgacctctagtttttttttttttttatatctacaataaagatgtagacgggcggtggtggtgcacatctttgatgccagcacttgggaggcggaggcaggcggatctatgtaaattcaagaccagcctggtctacagagtgagctccaggacagccaaggatatacagacaaaccctgtatcgaaacaaaaacaaaaacaaaacaaaacaaaaataaaaaaaaaatatacaaaggactcaccagattccgtcataggagactggccactcatgactcccattgctctagtgtctgggagaacagttacaggtgtgccaaagacttgcattccgattccctgaaggcccatcccctctatctactacatggacagttctagaacatattaattcagtgggtcttaggggccagtgagatagctctgtgggtaaaggtgcttgcagctaagcccaatgacccgagttcaatccctggggcccacatggaatgagagaaccgactcctgaaaattacactctgatctccatacatgtgctgtggtacatgcacccatgcacacccacatgcacacaaataaataaatcataaaaaagaaaaaaatgcatcttgggttcataacatctttgggcttctaggactttgcaaaatatcaccgtgtcgtgtgctccttccaagctcacagaacgtagggggtcccaatatccatgtcctgacaataatcacgtactccttctcctggctcatgttgggagagcatgcaaagtcgtcagtggaaacaaacccagttctattttcacagagtggattctctttgtagtggttcaatttcctgtggatggattgagttctaaaacaataggagatgttttaaaatagaaaatttcctctgatgtctacgagcagtaaaaccaagagcacagttggtaatgtgattcctgagtccagcctctgccctcaagcgcttttccttgcctctgtccttggtagccaaatctcagggagtcactgcgatgagctggcctgggaaccctttctctgccggttgattgctctgaagggaaactgcttcctacggggaagcagcctgtacaaaactgcaagaaccactgacgactccttcacctcttactcaccaatccacaaataacatcctaaagctatagcactttacctagacgatgtactatacaggggattttgggactgtgactacatcatttctttttttgatcttcagttttgtgcatgagaacgtgtgtgtgtgtgtgtgtgtgtgtgtgtgtgtgtgtgtgtgtgtgtagaggtgatggagaacaccaaagaaacaaggcccactagtcacaatagggctggtgcacataagaactcacaagactgtggcagcatgcacagggtctgcccaggtccaaacatcacgaggtcctagctctgactggggaagtggacacagactcccagccctaacagagttgctgtttccaaatgacaactgctttcaaaggaaaaatcagttcctccaatggagtcttactgggtatacaaaccacacttaagagtaagtcccatgcccagcagtatatggcaaacactaaacaaactcatttttggaggtttttttttttttctccatcatattgctttgtttgggcaattttttttatatcttactcatcttttgtttgtagattatgggttttgattttatgggtttgtgtgtatgtgtttctcatgccttttcttttataaaattaaaaaaattgcctgttttctaagaaataaagaaggcatggaattagatgggtgggagggtgaggatctgggaggagatgaaggagggaaaaccattaccagaatctattgtatgggaaccttatttaaacattatgaaaagctatggagccataaatctcagttttagtgataacatggaggccttgggaaagctgtctcaattcagtggtccatgctgcacgaggccagagatttctatgcattctttagtgttaattactacacaatttgttgaagatacaatagttattttctacctttgcagagggtaaggatattttttctgtgtgctaaggcttagctttatccttcagtttattgactggtcacgtcaacatcatgaaataccacgattgtgccatttcacaggcacagtaccaacacccagagggttgaagcgttttgcccaaaatgaaaaggcaaataagtagaccagtcagccaccccataaagggtgtctctctcctgagttctcagccatatgttgctaaattgtagaattatgctaacccaaccagtgcatgtagagctcagatcttatctcccatcccaagccttttccgtctacctgtgcccccttgtttacccactatctaggcatttataaataattgtagaaatcgttatggaaactatatgttctcctggtacataaacacacgcttatctctgggtatttagaaaatgtccctcaaatatgtttgcagtgagtgcccagcagacacttcccattctgattagacccggagaacagtgataaagtactgtcaactggagacctcgccatcctgatagttacatttatgctgaagagtacactgttttctgcaagaagtataggtgccattttcaaaggtcaaataaatcacctttaaagtcgtgaaaaagtaaacagactgatgcctgggcagctttcctgggtttatgaggtcttctggcagcaggggaacacaggcctcatccatcaccccacccccagctcacaggcacttattccttggagcgatcactccatcacccagggtcatttccctcaaactgttattaggagatacataggcacatgcgatggagcccttcccatcagctgacccttttccaaggtttgctttctctctaggtaaaatggaaagttgttgcaatgacacaaagcagactaggaagatgatccaggtactggaaggtaggggaagagcaaataggggaccatagcagaagtgacagggagataggagggcaggccagcatggcacgacataaacaaaatagctgtcactgatgaaaaataattgcacagtgcatagagagtgtgactgcctgccaatcgtggcctgctctgcttagataattttttatttcaagctctctgaagggacttgacataccttcccccagcacattcttatgttatacgtctatggcgaaagttccctgaaaatctctaagtcatcttggaaatgactaatccatacaagaaaataagatgtcttctaaagactatttttttcagagcacttcaaatgtgtgctgttatttcactgtcccaaacggagagcgggactggtgtgaacaaagacccccaaagaagggttgcaagcctcacgatggctccttaaaccttgtagctgccctgaagttggggtcgtaggcttatggtgatgtgatcttgcctctggctttccttctgcatgtcctaatagtgcaggttagacccttgctactaggagaagcttctctgaactcagacatccagtagtatttgtaccagtgtggattttatgggggtgggtatagatacaggaggtattccaaatgcttttatgatttgaaagcatctgactttggtcttttgttttcttacactttttgatctagaagacaggtgaggaaagagggagggagatgaaaccatttaactcttcatctgaaagcaatggtattctactgagtcaatctcatgtaaatctgacgtttgttgctttaatttctttccagcccaagctagcctggcatttgtctcagctagactgcagagaccaccgagtgttctcatcaaccagagacctaattgcggccatttattatagtcacttatctgatagtggcttcattatctgtgatagttttacagggacaaaatccaccaggcattcagcggaatatataaacatgttatcctctgacagggtgtctgttacttactgtcaacactaactggcccttgccacatatctacagcttatatgaagtaacgatgagtttaataagccccagtgaaagctacagtgtaaacagcatatcaggagtgtcaccctgttaaacaaacagaggtgatggagaagtacaaacagaactggacaggagaccaaggagatgaagatcaggtgtggagagaaattccactggtgatcccccgactgggttaagatcacagcacaggcattgtgtgtaagggtgacacccacacagtcctttctattgaaactccacaaattctgatttttttttttgtttttgttaacccctgaggaggagaaataggtggaaaataagcaccgatttctcatgattattattgttagaaaatgtctagtaaataactcaagttttgagagacatactactgggcattctacagctagcatcacaaagatatgtgtcttgcgtgtggtgtgtggtttttttttttttcctttctcagtctcattggaataaaaccataaactaagcttttaacacagagtaaagtatgtgaactacataaaccagagtactgcaggcagcttgtatttacattaaatagagatccatctgcatatcctggaggataatgggaatttcctttgcccaagcaggaagagttcttgtatcctcagggaggcccaaatgaggtctgggatacagagaggaagagccttctccctacatcctctctcccctggcttcttcctcaccctccataattcctgttggtagcgattcgtttcattcttctgggattaaggcctttttattttttatttattttttgtctcttggctttgcaatttaaactactctggaaggggaagcagatgaagcctttattgacagaattgttagcaacaaagatgtcataaagccctgggctcaaatccccttgtagaaacagtttctctggctataaaatgctgtggcccctcctttgtatcttagagtggaaactaacaggaagcagacaacccaaaactcatggtggccaccgcctcagcatttcgagcatcagcttagctcagttatgcacgatgcctgcaggaatgaaccccgggatggggaagactggagcagaaggagagaagctttgccacaaaggctttcaacatcagaaataacaatcctgtctgccctggccagctgctgctccacaggaaggctctggtcaaatgcattcaagaaagcaagggctggcaagtttctctagcacaggacttctcaaaaaccttccccaacgaactcatggtgtaaatatctaaggacagctgggtgtggctgtgcacatcggaggcaggaggcccatgagtccccaatttgtctgtctacaaacaaacggaaaaacaaccccttcgaacaggaacaaacaataaaacacataggaaaacctcatgaaaaggatcaagtctgaattatgaaaatgtataaacctctgaatgatttggcttacttcgtgttggtcttcctttgagctgtctctgtctctttaacacagtcaaggatttctcagagttcacgatgtgaaattcacacttgggtgggtttgctttgtttgggagacacagggctgcgtggagaagaccctggactgaagggaggaaggcgtgagtgagggtggagttgatgcatggtggatgctaaaagcaaggaaaagtacctggaaggttagatgagagagcccgagggcaaacacagtcttccttagaggtatgacgagggcactcccatcatctgcctggatctttggaaaagctcagctgcccctagagaccacccatctccctatggaccacttcagtcgagaactgcatttgggacaaaatggggttagatgagtttcttggttgctgaatttcttgccacgctggactttagctctccaaggcagacccatgaacctgaaaggcacaactcggtgaaagacagcacagggaggaaacaggaggagaaagagaaggacacacgaagcatacggcttggaaaagatggagaccatggaaggcttcagcggcaccatccccaactgtcccctgattggactctgctgccgacatttgagcttttgccattccaaatagctggcctctgtaggcctcttcggatatatcactccctctgttcattgtggaaaagtccttgacaaaagccatgtaagcacagaagggctgttttggctcacatttgcggatcagtgtgtcacggtcgggttggcatggtggcagacgcttgaggcagcaacagagatggaggctggtgctggcttgcttccttctttttatgtggtctgggacccattgggaaggggctgcccacataaagacccaatctgaaaactcccttgtggatgtacaaaaaggcatgtctcctaggtgactccagaccttgccaaattgacaatgttagacaccacaggagcaatagggcatgaaaataaaaacaaatctaaacagcaacaataataaaagcagagggtgtctgtgaccacagggaagaggagagaaggaaaaatttgagttacagacttatctgcctggagcctgggtcactgtatcttggagcacataattaattggtagtaaggacggctttagtaggtttgtccaactcactgcctgcagactgcatgtgcccaaggctagctctgaatgcagcccaacagaaaattataaacttacttaaaacataacatctttttgcatgtttttggtaactcttctttcttagatttttggttgtgagtgtagcctttcatggctgagccatctctctagccaagagccttttttcctatttatttatttatttatttattgtgtgtatgtgtgtgtgtgcatgctctacacatacacttgaatgccttccaagtgtgtttgagtgtccttggaccagaagaaggcattaggtaccgtagagctggagttaaggaagttgtgagctgcctgatgtgggtgccagtcaccccacttggttcctccatgagagaagcaaatgctcttagctactgagccctctgtttagcctctaatggtttcagagatttggcttggtatatcaggacattgtgttacaatgtcaatagattggacacactaggtgggtgtgggtagggctttcagatgagccaactatgtcccctgcaaagtcatatgatggtatattgatccctgtaaagaagtcattagggttgaagaaggttgaaaggctagggccccccctatgataggatgtgtgttcttagaagaaaagacactggagagtgagcctagcagtgtttttcatgctcactgtgagaagacactgaaaggcagaggaaggcatagaacaggtgccgagttagccactgctcctatcttggacgcccctgtctccagaagtctgtgactcctcgatatggctgcctacattgagtgagacaatgcaagcctgatgctggattctggagtttaacacaaaccatcaactttggagaaacttctgaccacctgagctggtcctgagcgacaatgggctgcactgggctaccctctgctcaatcgttctcatggagttcaagccccagaacccttgtgtaaaagctgggtgaggcagcacacatccgtaaccctggcattgggacgacagggactggagggtctctggatcttgctaatcttcttgaatccctgggccccaggtatgaggtagggtgtgaacaaggaggacacctgatgtgtgaatccctggccgccacagctgtgcatgcctgtgtgcactcccccccccccccacagacacagacacacacacacacagacacacacacacacacagacacacacacacacacacacacacacacagacacacacacaccacagctccatggacaatgtactctttttgggctgtgaagggagtgtttttttctctccctccattttagtctgtttcttttccatggctccaatccccatctatttgaggtaagggtttgctccaggcatatcagtgttttgtttgtcgtgtggctaacatgccctggctttagactggaaaattaaaaaatatgtgctctggctcttctgagacaagtgtcaaactagccacatttcctagcaggaagcccaggcccaggctgtggtttaattcaggaaggacatctgtgatgacagaccctgggaaggcagatggctttcatgaattgcttcgagatatagctgcttatttagaaaagaaaaatagcatatatttatgtgtgaaggaaagctcagttattcaaaatacctattttaaaacattttattttattttaatttacctgtggaaaggtgtctatgtgcacatgtgggaatgctgttgggggcagaagagggtgtccaagcccctggagctggaattacaggcagtcacaaaccagctgatatgggtgacggcagcagaactcaggtcctcacaagagcagcaagtgctctttctcactgaccatatcttcagcctctaaagcatccactgatctgtagcagcatgcctttgctttactgtgtctcatgaagtcgtaaccaagctttacattgatttaattaattagttagagctcaccatgtattagaggaggaacttgggctcttgattctccggcttcctcctctcaactgctggggttccaggtgtacaccaccacactcagttttatgtgggattgggatcagacccagggcttcagacattctggttagatactctagaaagtgagctggatctctagccctctgtttataagaaaacttctattttgagatagagtcttgccatgtagcccagactggtctcaaacttccaattttcctgtctcagcttcccgactaaaggtacccagtgtaaatgtgacttattaaaaaaattgaggctcattatgttttcttaggccctctgattacctctgactgatcagggagtcctctgggtgaaaatcaaatgttaaaaaggtgggaaaactgtcaaaattgccacagatttttaaaattattattattttaatgtttggttagcataaagaaatcaaagatggtactaggaactttcttttgctacacaagtgtcagatcaggatccagatgaattatttttaacagcacaaactactgatctgcctctagagaagcaggaaattctcaggagcggggtttggtcaagcagagaggggtggaaggctggtgcccttggcagctggcctcccacaccaatttagatttggaagtttccagcaattagcagatcacatggcatctacagcattaattggccttccgtccacctgctgcctaggtcttgctttatttgacaaatggttgatgagaggcgaaggttaaagagtaagggaggttatggggagcttctgtctagagagtctaccacaagccagtgagtctttgtttgtcctgtgtaaacttttacctcattgctgttgttttgcagtacagtagtgtcattgtcatcatgcccattttcagatgcacacactgaggtccagaagtgactggcccaagaactatgtggctaattaatagcaaagccccagtgagttcatgatgagaagttttctttaacttttaaaaattaaaatgaaaactattttggtgtgtgtgtgtgtgtgtgtgtgtgtgtgtgtgtgtgtgtgtaggtgtgtgtgcaggtgtgaacatcttccagtgtacttgtgaatccagaggaggaattaggtatttcctgcattgctctctgtctcatttggttaagaaagggttaatggactgaaggtgaagctcactattttggtgaagtctgattggctttccaggacccacctgttggtgccagccagtgctatggacacaggcacatgccacccaacttgctgtcatgtgggtagtggagattctgactggggtctttatgcttgctcttacccatgtggctctctctgcagcctccctctttttattagcaaatatactttgtccaaaacagtgggttccattagcacacttctgtacaagtatacatgtacgttaacttcactcaccacccccattcccgtctcttatcctcccctgacacgggacattctcaacagcagagtgacctacatggtgttaggtcttttaagagagtataaaataccagggagttctaattatcttttttttgtgtgtggtttttcgagacagggtttctctgtgtagctttggagcctatcctggcactcgctctggagaccaggctggcctccaactcacagagatccacctgcctctgcctcccgagtgctgggattaaagacgtgcgccaccaacgccctgcaagtgctatctatcttgttcttcaaaaatttcagccatgatggaaacaaggcacgaaagagtcagttttcttataataataaacacaatcttccacagtagtatttaaatagttctgaggggctgagaaaacagttcagccaggaaagtgcagtcagagaggaaacctgagctcagccccccagaacccctgtgaagatccaggcgaagcctgtgtgctttaatcccagcactggggaggcagagaaaggaggatccctggggcttcttgccagttcgcctagcctacttggtgagctccagaccagtgagagactttgtctcaaggggaaggtggacagtcccttaggaacagcccctgagaaatgacactcagaattgtcctctggcttttacacacatacactgtgtgcacacacctgcccacacatgtacacctgaacatacatgcataccacacacaagtaactaagtaaagaaaaaatacaagctataggttgtgatttgtgagaggaagacaggaaggtctaacagacgaggattagtgaaacttaagcctgtgatagtaggatcactgggtgttgggaaataaaggcatgtgtgtagtgtatgtgcacatgtgtgcatgcacacttgtgcacgcacgcacgcacgcgcgcacacacacacacacacacacacacacacacacacacacacacacacacacactttaagctgtatgcgaccatgggacttgaatttgtcatgacataaatggtgtggatagtgaatagcaaatgcatgtatgaatgtatttgctggctgattctcccgttctccacggcatctctttctcattgttagcaattattacagtgtagtgaactcaggtgcagtatttccgtgtttgtgatccatttgaaacaccacccttaactgtctagaatcaaagacctttaaaacacgtttgatgagttaacaatgatgggtagacatttactgctgcaatacaacaaaacttacggtttaactaaacatcaaatttctagatacttcatttattcactccacagaccatggttatacagttgtcttgtgtaactcatctcccactgaagagtataaaacaccacacacttgcttttcgcagagcagtttgtagccagggcatgaccttttggttcaatgctgacaatcagtccttgtggggaatggcctgtaaagagagacacatggagcagcctcatgcttacctgggaagactaacgataacagccgttctgcatctgcttgtatctatgcagatttgaagactggaaagatggggtgaccctgggatttaacaacatgcgtggccgccccatggacctccccatcctccagactttgttatgcaagataataattctcctattttattcaattcaggtggtctttgtgttaacaacagacagaaagtacctctagtcactcttcctgtttgcagagaactgcatgtggttcatgaacaccttctgatgcactcatgaaagcattccttgtgttttctattagggtatgattttcctttgggtaagcttcatactcttctccttactcaatattgtcaccctactcagcgcaatgagatggctcatgacagcattccttctttccttctgcaatgatacaaggtatctgggaagtgttgtagctgtagcaggctgacactgttgtgttaaatgttctctctgtctctctctaatagattagcatatatgaactatacacaatgggttttgctgtgacattttcattcatattgatcatattcattctcattattctctcttatcttctacatccactcatcaccctactttcctgtcttttttgtactgtgtgatccattgagtttctttagggttgtaaacaggtacaccggtaaagagatgtttacaggaacatagacaacttaccagtggctactccattgaaaaaagcattctcccttcccccagctaccattaactgcctacaaatgccatgtcttctctttcctagagggttaaaaaaacttactgatcatgtggtctagctatgatcacaaaaatgactaatgtctgttaagtgattcactgtgtttgacatagttttgaattatattgggtatgttagtttattaactttgcaacatcctcagttgacagtgaaccatcctgaacccgtgtgccccacctatcatgaactaaagctccccgagaagcctttggtgagttggacagaactgaaatggatctgtgatatcatgctccgtgtaataggcacttggtaaatatttgttgagctgagtccagtgtctgctcagttacgaaagataagcagggacagagtctctggagaggctttgggccaggcttgaaggagacagctgcttctgggacactgcagctgggatcctccagggtcaccagctcaggttcagcccaggtcctgactcagcagacaaggatatttgtggcaggccaagggaatgagtggtgaccttagcctagagcctaggagaaaaaaggcctttggcaagcctaataatgtctttgctgttcttctgaagtaacttctcctgattgtgtcaagagacttcgaggcaggtggcatgccagtgtgccctgctcatggaattgcggggggaaggtggcagaatgtatgttgggctgagttagggataggggagtgcaggtttcactcattaagtagaaataatatataattcataatatacaatgtactatacaatataatatattaatataatgtagtataatatagcacatattatattatatataatgttatatatattataatatatatataatatatatactcattgacaattttatatgtacatacaatgtgacatagcttctactctctctgggccttctcaacaaattcccccttcatgtctccttatttatttatttatttatttatttatttttggtttttcgacacagggtttgtctgtattgctttggagcctatcctggcactcactctggagaccaggctggcctcgaactcacagagatccgcctgcctcagcctcccaagtgctgggattaaaggcgtgcgccatcaacgcctggcttccttatttatttatttatttattcatttattcattcattcattcattcattcacttactttttgagactagatggcttggaacttactgtagacacagctgactgcaaactgacagagatccatctatctctgccttcggagtcctgagattatagtcatgtgccaccacagctagttttattcctttctgtataactcactgagtctagttcgagctgcccacatgggtgtggggacatccactagagtatgtcacactaccagcggtcatacctctgagggaagctgactcttccttcccctgcagtcatcactgccaatagctccttctcagctattggctgagcctcctgagctcctccaggggtaatacatattttatataatatttaccaatgccctgtgtaggttctgactttatgacttcataactctgcgtacataatgatacatgggggttatatatcatttgtttacaggaaagaacactatctatttagctggggagcactatgaattgaacatgtccctgaaaataattgtactggacacttaattcccagcacaacagtgttgagaggctagacatgtaaaagatgactgcctgcaggaactctctcttcagaaatggatgccattctactgggagcagagttatcaagagagtggagtccttataaagcaaagcaagagcctcttacctttgctgcctgtgctgtgttctgtcatgtaatggcacagaaagaatacctccgcagagtggccagatgtggccttttcattatggacttacacgggaactgtgagtcaatactgtttttttttttttttttcccctctagccaaggactccttagtttagcctggcctggaaccagccatataacagagtgtaattttgaccttatcatccttttgcttcctcacctcctgagggctaagattataggtcctgaagaaaggtaagccatgattggttacaattacccagaagacagaagacataaagcaaatgtcttgaccagcaaatttttattacgtttatgcagtgtgggattgtttaggagttcacgtgtgtgtgtgtgtgtgtgtgtgtgtgtgtgtgtgtgtgtgtgaagtcggagggcaacttgtgggaggcatttatccccttctaccgtatacaacccaggtacccaactcaggttgtcaagcttggcaacaaggcccctttactcactgagccgtcttgctgacccattggctaacacatttttaatcattataaattactcgctgtagaccaagaagagagtgttagaaaggaaagggtggtttggcttacaatacagtaggcaacaggctgagctgaaggaattcgtggttgctataacagtgagacttgttacattcttcccatgagtgaaatcgtctcgtttttttgtcctcagtgggcgggagccttgagcagcaggatgctcgttttgtggtttgaacataagcataaggaagctctgaagggtccctatttgtccctatctctttatcatgacctctctagttccaaacagttgtgccgggttttccatacatcactgaagtgatttagtatttctgaaataatgtgatgatagtgaatttagccttgagtgacagctctgtgtaaataagtgaagggactcaaggtggtcagaatggattgtactgatttcccaggacattgctatttctgtcacccagtcctgtccaccccaggaaggggtctgtgtgggcacaggtggttccaggtgctgggcttctctgccggtggcccttcttgctgggctattgtttcctccctgctgcatgaccacagcctctggctgtctggggttgataacagaaccataaatctcccttctggctgccccatggcacctgaaacctcagctcaggcttgatgggagaaaagaagataagacctcctggctggtattggaagttatccaagagatgctgggaagtctcagggggagggtcataggctgctggaggtctcggcagcaggcagcttttcctccaggcactgtctatcctgccaagtgagatgaatgggattacctgcagatagcatcttcagagctctgcactggcttctaaacttgtcaacagcgtgatggctgtgcatccctgaaagaaaatggtatcgggcagaacctgagagcatgttggggtgctgctggccctgaaggtgggatggtgagggaccaggagttagacagattcccgtaggcagacagacagacagaaagagggtctatagatagataataaagttgggaaactctggcttcttccttatattcttgacccaagacaaaggtctaacagcttgctggtctttttctctcatcaatagcacccacatccccaccctgaggtggcctgctctgacaagtaaaaggctgggactaggccttgtttccccccaagggtgggcctcctagccttgccatctttatgcaaactgaccaaccctacattagggaggacgacacccaacccctcaaggagattctgggttttgggctctgaagtggcttcttctgttttgcagggggtgtttctccttgtgccctgtagtgtgagtctatttcctcgctttaatagcagcctctctccactggctgattctgtctgccatgtccgagttctcctctcagttacctgatgcacttgaggtttctcctgccttttaattccttaacaggtagagaaaaccagctcaatcaggaatcccagatgctaacagcaggacccaatgggttctagctctgtagaagatgtaaagcaaatgtcttgataagctttttgggatcccacaactcagtccttccccaccattttcagagcaagctcttataacacggagagctttttgagtggaaggcatttgctgcttctgacggctgagttatttgagtacatgctggctagcagcctcacagagcatctctggatattcatacttaggatggggatgtggaagggattttgcattgtgaaatgtgagacttagttctctatcgacatctatgtgcttaacgagcccgtctcatggctgctcgtgaacgctcatgtgaaaggcatctgctgcatggaacaatacaacttcatgtctacacatctgcctcagtacttagtatgccccatctttgggagagagaaagagccactcagaacgttttctgtgtttcatgatctagaagagggacatattggaaacaccaagcatcaagggaaagacaacacttctttcagagggggagttgctaccaaggactgagctgctgcagatcacctgtagagcatctatagttaagatcctggctgctgcagatcacctgtagagcatctatagttaagatcctggctgctgcagatcacctgtagagcatctattgttaagatcctggctgctgtagatagaatctataggggaggtattggctgtttggggtggaggaccactctctgaaacacaaacatgtacatgtaggtgtgagcgtggtagcatttggtagtcttctttagaaacaaagcggggctccctgtggctgctgctgaagttggtgaattcagatgcggccagcactgtaacaataactctttctgccaagccgtctaagccctgctgtcacgtgggcgctttcctacagggcacccaagttctgcccgctgtgggacattaaggtcccaagtaacacagagagacttatattaggtacaaatggccaatgcctaggatttctcatctgctagctcagtcttaattatcataaatctatatatatatatatattttaaagatcttatttatttattatgtatacaaccttctgcttccacgtatatctgcacaccagaagagggcaccagatctcataacggatggtcgtgagccaccatgcggttgctgggaattgaactcaggacctctggaagagcagttggtgctcttagccactaagccatctctccagaccaataaatctatatattttataagacttattggacaccagcggtaagcatcctgtcttcccgggctcacatggtgactctgccctttctcctacatttcccagaatcctccttgactcccagtcccacctaccttgtttccctattggccaacagtactttatttatcaaccaataagacaaccatatacacagaaggagctcccccatcacagcacaacaggtttggagactgtcttcttacattaatactattgattgcttcttccccatggcaggtctagctcaccacaacagatggtgtagtgaccttgagagactcaaggccaaggtaagctgcaccttgtggtggttttgatgtcttcattttaaccaagttaaacctacaaacgctgtcagggagagcatacccagagtgctttgggaaaccatgacaaccactcctgatgccttgcagtggggaccattattgcatatttcccaatagacttgatgatgtactcaggcacccagctgcttgtgttcctgaggacagcatctcctctgcagcaccatctgctttttataaatgacaatgagatctcattgtcacacagctcccaggagagaaatggagtgatgtcatagctaggagagtgttctagagggacaacttcattatattggacatggtgaggctgtcccatggcactcaacaaacagcaaggctaattgcaaagagtttccaatccctttggtgatcatgacgctcccaagccacttccagtgggcggattcccctgcttctcttacagtacagcattgtgggtaagagagtagctttgacaagagacaggcacagcttcacgttttatctcactattaattctaaacttggtttcttccctagaatacaatagaagtaactctgaatgtctttagggtcataattgatggaggaggctgtatattattcacttagggcagctctgggcacataacaaatatttggcagattgtgaccattgttagtacaaatttggttgatcaaaccatctttaataattgcacacttggggctggagagacggtacagtggttcagagaactgtttgctctaccagaagacccaaggtttgatttcagtacccacatggaagctcacaactatgcataactccagttctgtggcattgaatgtcctcttctggcccccactgctaacaggcatgcaaatgatgcacagatgcacatgtaggcaaaatattcatacatattaaaagaaaaatagcattgcacactgcaggtcacagagcctcactttatctcatgcaggacatcaatgcccagtgaagaattctcatagcggtagtctgctatgggacagtgcatagcagccttattaatccatgccaactttgccggtaaaaaagggcaattctgcctcagttaatttcccatttcatcagctctaatatctagaggcttaccttcccccaaggaagcagacacaattcttttctttttcttttactaatttaattttttttaaagaagagtgtagttatatggcccaggcaggtctagaactttccatgctcctgcctcagcatccagactgctcagactacaaacatatactaccaccagacccagctaattattttgctctttaaaaaactgtaaagccataaaatacacattgttgagtgcccagtatgtgcttggtgatggcctggacacgagctaatttcacctttacaacaatggtgcaaaaaggaactattattgagcagttccatgggtgcagaaactgagagtcagaggatgaagagcagtttcctgtgctgcgatggtaagagtgatggatgtgaagggctagtgaactgtgggtacccaagagacgtgaaatgtgtgatttcatctgtgagatctgtgagctccatgctggggagccagggagaagaaaagagcattctggccacaggcacacttgctttctcagccaactggctaaccaggaggaaggctcagttcagcactctatttttgcttatattttttcataggattaaaaaaagttattcttcattttatgtgcttgtgtgcttgtgggcctgagtatttgtgcaccaactgtgtgtttgtatctgtagatcagaagaggacttctaatccccacatgggttctggaaaccaaagttgggtcctctgcaagagaagtctgttctcttcagcctctggtcttacattttaattgttttagagcacacaaactttctgattttgttgttccatcctctttggtccagcacaggatggttctaatggatgcttacaccattctctagataagcctgtgttttggttttgagtaaaaaacaatcgcaaacaagcccttgccggacagatctgttctccattgagatgtctgaaaaagcattcttaagatggggcatggggacagggcaagtgaggccccatcattactagaaagactatgcggcttcattaaggaaaaaaatcacaatggcgctggagagtttgctcagtggttaagagtgcccgctgctcttccagagactggctttcagttcccaacacttatcaggtggctcacaactgcctgtagctctagctcctgacatccaaggtacctgcattcatgcatacacagatacacacacatacatgtaaacataaaattaaagttcaagtatgtacgcacatacacacacatctacatacatgtatatatgtaaatagtcctaagaaatcacactaaagtaatggaactcacttgtgtgctgggttaaagtacattaggaagatggtcaaattacttatttcacaattaatacttagtggcttatattggcttagtggcttagttattgacagtctgcttttctgtgttcgggggttccatgttaagaagtgatagctttgggttccctgttggtaatttgagttcctgggtctacatgctgggccctccaatcccaagtattgggaatctgggctaagtggtgactggaggaggctttgcagcccctcccccactccccccatttctctcaaggggtctttgagctcctagcccccccaacaagcactctcagtggtactcgcccctcaggtctgtattaccctcatctctcaagtgtcctcactatttcaatcttctgataatgaaaactactcttccctcttcagccaggatgagctttgcaaggaataaatattaggaagttgctttcttgctgaaaggctctttgtaagtctctgagttagcctactccaaagctaagcccctgtttacccatgctggcagcatgctggttttgtttaggactgaggcaggcagcagcatttagggaaatgaggctctgttccagaccctgatgccctgaaccgtggaaatcccgttagccatgccagctctccactaagaagtgtgacagggaagccatttttggtcaaagcaagcagtgtgatgagggggaggagacaggggatggtaacggaggcagggtgtggagaaaatacaatgatagatacgcatggaaaaagtcacagcacgctaccaaaaatgtaataaaatataaaacacattttctgttgtgactgtgctaatgttgctgtttggggacacttattgcattgaagctgaataattcactaggttgttggtacccttacagtttgactcccttgagggtggtccttcatttttacttgtagttaaatgtgaattttctatagcctttatgaaaaatattaaatttatttgcaagaaaacatagggcccttcaagatcaagtatctgctctttttttttttttcctgtcttttatcagctactccatgcgttctgtgttctggtgatactgagctattggtaattgctcttttacactcccatagctgtgcgtgaatcacaccctgtgaactgagtaccatttccccctgttcgcaggcataactcctttttatgtttcagaactaacatgtgtcacctccttgggccaggctgttctctctaggtagatgcctctcccagagcttgtgcctctaggcatatgcacaactggtcaaagacttgctggccacgggagccactccctgcttccttccttccttccttccttccttccttccttccttccttccttccatctttgtatggggactggctaagacctgcatatgtcaacagggatcagaggcacctgtaacattagtgcttttgtagaaaattcagcttggcttcctctctgctctctgactttttgtagttgtagaaggggctcacaaagatgccacaaagaaattgagttcaatgacagaaatcccggtactccagtttgtgacctgagctgaatggagggactctagaatctagaaagcagatggttctgaaaggaactggtccagtccctgtcacaagccccctggcctggtgactctgcctccttagtcattttctcttgatcagaccactgggtcctgagccctcaagtcatgttcctgcactgttcttcctagggcatgtttgcccggctcagaaacataaccaggcccaccccttgggctctgatagtttctcttaagattaaaacagatcctcggacacaaagttctgttgctccccttttttgtttcattgcatttagagagtgattgcttgggggcatatggatgttgctttcccacatgtttgcctcatttaatttcttgccaaacatgtgtatgctaacatggttctaaccggcagaaccgaagccgcagtgacctctcagtcaagctggctcagcttcatgacatccactttccactgtcccagctgcatgcccctgtctttcaagcttcatctaggaccttattcttgcagtctgcagagaaaaccattttcagattttttttttaaattacaaagctgggactaaagaaaagccaatgaactcaaggagtccagacttgatttttcttcttgaacttgacaatgttgaggattattttttcagggccagtttcaaaattctgggcatccaaaactatctttaagcaccccttctcttctttaaactatcagaaattaccaggatgttaagatgatagaaggggcatccaccaggatcctcatatcagcacaaagatttgtcatcctcatctggttctcaccaaattcccaaggtttcatcttctacagtagcacctccaggatctgtaaagtgccagcaaatactaggaaatcctggtggtttgtcagaatctgtgctaaaacacaatccaatgcaaaggccagcaaccttagctaagcgttctttaaaaaataattccataagttgcttgctgtcagccatgcttccaggaatggggcagccatgcctctttcagggggctgtccccggggacctttcaccttacttagtcccctgcaacctggccaaatgggtatagactcgggcatgctaaattctcaacttgaagagctggcacaaagacagaagctggataactggtctacctgaagatcttgagttcagcaagaacatgaggaggtccaaacccaacatgcaatgggatgtcagttgcaggatgattttttttttcaagacagggtttctctgtgtagctttgtagaccaggctggcctcgaactcacagagatcttcctgcctctgccttccgagagctgggatcaaaggcctgtgccaccaccacttggctgtgcaggatgatttttgttcacagttggttgagttggagacacaactacaggcacattaatgccctggtcctgcctggatcaaagagtgctggtgaggctggagagacggctcagtgcttgcttgccacacaagcatgaagacctaacttcaacccacagcacccaaagaaaagctgatggtagagacacgggaaaggtgaaacaaatgaattggcaagctccaggttcgatgggagctcatgtctcaaaaatgataatgtggacagtgattgaggaggacatcaaactctgatttctagtagctacaaaccccccccccccacacacacagagggtgacggggatccaaggactgaatcttgggtcttctgagtgtttggccatttacatcaggaattcagccaggactgtctgtgcacacacattttggaagagatgtaagagggatgatttcccaccaggggcagggaattggtatgggcaggagtttgttggccatggcagtgagggtagggcagagtgagtccattcacttcaggaactggaaaactggcttcagtgaaattcttcacagagtggttgttccaaaagcagaaatgaagaaacactgatgaatacttggtgtactttacataatcattttcctgattgcaaaactaaaatcagaatgcaagtagcggatgcaacttggaaagagctcgcaggaaagtacaaagaggaaggcctgctaaccaaggttgagtactgcccacagagctaagcaccatccacagagctaagcacaccccacagatgaagcatgtctgtagagtatcactgtttctgtgatttaaacattattgtgtaagtacatctacaattttgaggtctcttcttatttcatactatttcatattcaaccatatgtttatttatttttaggcttttcaagataaggtttctctggctgttctggaactaactatgaagattaggcttgcttcaaactcagagatctgcctgcttctgcctggaattgaaggtgtgtgtgccaccatcacctgccacaaatcacttatatacaattatttatgcatttgatttttctctttatatatttattcatatatttatttttttcttgagacaaggtcttacactatagtccagactggtctgtcattttactatgtaatccagctggcctcaaactcatgcctcagtttcttgagtgctggggccacaggacagaaccaacatgcattgcaagagaaaggaaaccaatacagaagccaaatatccacagtgttaacttgatgcattttatcttttggaagccacctggcctcatagaggaaagatagcctttgtggcctagaaagcacaacccatgttgcctgcctctgtccttgataccaagaaagggtcccaccagtggctacatttccaacgacaaattacagaatggtcactttctttttgctcataatacagatgaagcagtagatatttacttaatggaatgaatttataaggtctcttatgttttcctcttatgtggctgtctcatataaacagatgggcaaaacacaaaagcagctggcagagggtaaaggaagaatcataaatacgaaaatgcgaaagcagaatttcatagatgaatccagagtgggttgtgaaagcctatggggagttagtgaactgttgaaggttccatgagtactggagatggccttgtgtctcagtctttctcagggctggtctgactctcattctgatgctaacattgtcgcttggtgttttagttctctttctgcagaaaagggctcattattcagtgtgataattgaatcaattgttcctgcctgattgagccagcagatgaaccctgactagctggttttctcctggtgcagttgagttgctggtcaaatctgcacagaaacacggctaacaaagcagaatgctttcaaaaccatccggagcctggtgggaaggcattcatacacatggctcatttatttcaaatcacacccaggaaatccagtttatctaaacaaatggcctagtccgggagggagggctgaggaagagcaactgggggtagccataaaatgttaagtattgcatagctggataaagcgggatcaggaggtctgatgactgtttaaattatgatagaatgtaaactcatgggtgacatctaatccggccatatttcccgcaattattccaccccggcagggtttactttcccatcagtactggatcacagagctgtcagctggcgtttttgaagggtgatttgttgccctaatgatgatactgaaatctgtttatggttgtttatctaagggtcatctttcttccaaagcagccttcttctctggggattctatttgggcagctttcttcaattccccaaacagaacaactgtcagtattacacgaagggcaaagatcttgtccatgttaattttatgactgatgactgcatcatagtcaccaagccaactatgctaagaatcatgccttaagcattgaagatgctgtaagtatccacagagaccataggcaagcatcatttcctacactagttctggagagcagagccattacacacatcaatcacgtgaacgtcataaacagtaattatatacattgggcacttaagaacatgccagccactgttgtcagtgacaaccccaagaagtgggtgctgtcagcatcctgttttatgagtgaggaaatcgaggaccaggaagcttaagcaacttgaccaaagtcatttagttgacacactttgtacttcttactgaggttgggaggggagcaatgcgatgtggtactgtgcctcacagcatctaatcaaagtcccgatcaggggacatgggaatgggtgctaactgcttgagctacagtcagcagtggctcccactggactctgcatttcctttaagttatgtgggtttttggaaatagtttcatgcaaagcctgcattctgttctgtaagacagttggttttattccaagtctgaaccaattttctagaactaatgaccccccctcccccaccacgtgccttgtttttcttggagtctctggtggccctgacatccttctctcactcctgctgttagtatgtgtcttcctgttggaggattccaggtgtcacagggagatactgatggggctttggaagcactgagggaagacaccagtgtcgctgctgtgtagctcagggacatggatgaaccatctgtagtgtagggcttggaatttatcatatgcaaaatagggtattgagtctcttggaactctttaggctctagaaggcgagggctgtctagttgctttagttgcacactggacattttgaactataggatccatgagttctacttatttctaatgtataatgttcaagaaaagctaacgaaggagggagatgtcctccaaaggtagcccaggcaagagctgaaatagcagggcaggctcttttcctcctcagagctccacctgcctctgcctggtgtgggctcatttgagaaatggcttcagtgcagttactcactttgtcattttgatacatctagttttaagcaatttctcctagattttcttagtataggcatcaggaggctatgtatatctgttttttgaattgggacaggggttcattcagaagcatcaagagactgtcattttatgttgtatccttgtgataaaatcttatctatctatctatctatctatctatctatctatctatcaatcatcatctattgtctgtcttctatttatgtatctatcatttattatataatctaccatctgtcttctgtaaacattatctatctaccatcctatcatctattttatatcatcccaatcatttatcatttgaaataaacccatgcagtaaggatgttattgggaagtggagtgagtttagttgaggagacacgggtgccagggttaagttgtttgtctgtctactaccggcatatacactgcatctaaggactatgtgagggaccatgtatgtcatccagtgctttaaactggcccaggaccaagagaaataggggagggtgggttcagaattcagactgatttcctctaatcctttgtggagaggcttttcagtgtttgctgtgtgccatcttgtgccaagtggggaatccgtctggtctcccaggacagtcctggctaatcctattattcagaatggctattaacatcactatgtttctttcaatatagctgcccaaacaagatcagaacaagaacaccaccaataaacacatatggaaagaggaaatctcatggggccccatgcctaaagaaaacctccaagcaagtagggaagactgagatcaggagaaattgtcttccccagggatggcctgtctgggtgtccaatatcaattggacagccctgaaatcatatacgtaaaagtaacagcaatttgtatttatatatttatttatatatatgtatttatgtatttatatatatgtgtgtgtatgtaacaaaaagaaagagagagaccacggatttgagggagagcaagtcgggggttgaaaaaatgggaggaattggagggaagaaccaaagtggggggaatgatataattatattttctttctcatttttaaaaattgaagagcccggtcattggaatgcaatgagccaggagggtatcagaactgcccattggtgtcaggacttccaactctacaactctttttcagctgctcaccgacaacgtaaactagtcaccagtctcaagggaactttttgtaccataaatcttttgataacgtgcttaaaactatggatatccccagaaattattcaatatacttacaatgtgtatacaacaaaattttgtccaatttccatggtttgtatgagccctgacagtcatgtgaaacacagatgcttggtcatgatccacagaccttcagccaatagaaaatcaaatggcccaatcaggagtcaacccccctttgtgcaatgctccccgagccttggagggggtgatatagacttttcatttgggccaagtgtaaagcagctatacacactatattacactatactataaacactatactgtaaatcagcacttaaaccagttggaaatctcattaccgtctctcttttcaagtagaagtctctgaggaagggtgaaaggagaaccaacccgaggggataaacaaatatttagaaggtggtttgatattgacatttaacgtatgttcatatgttaaaaacgggggttgtgggtttctccgttgggcctatgatgtcccagcatgggtttatagtaccaggcatgaagtccctcttctggagtggctctcaagtccaatcagagaccagtcagtcacctcatatcggttgtgccagcattgtagcacatcttgctcggcaggttggtgtgcagttcataggattcatagctgggtaaggctatggactctgggaatggatgtaacggttttcattgctggatgtacgttaacgctggcaaaagtgattcagtgatccctcacactccctaaatttacctgcatgggctacttttgcacggctgtgattggcgtacttgacaaagacaagaagggaggggtggctttttctggctcacatttcagccagtcatggtggggaagacaaggcagagtggcttagctcacagaggcgagggtatggggcagactccacatcatgcctggcagaaggcaaatgaggaaccaggggccagccgtaacctttacaacctcacccctagtgacctacttccacctttcaaaggtttcacagtctctcaaaatagcatagccagctgagaatcaagcctcccaaaccagggcctgtgggggttattccaattcaaaccacgacaccacccttttgttatgacatttgccagttatcctattagaaggatatagtaagatgtttttttctcttttgggggacccaccgctcagctcccaaatgagtcacacatggaggcgtattcttagttctgaatgccctatctcagcttggcttgtttgttgccagcttttcttaactgaattatcctgtctaccctttgcctctgggctttcgctttactatgcctgtgtatctgtctctgtttcttactctggggctgtctgtctgtctgggtggctgacccctgatgtcttcctctccttgttctcttgttcatctcccttccttgattctccttctatttatcctctctgcctgccagctctcctgcctcgctattggctggctggtcagctctttattagaccatcaggtgttttagacaggcgcagtaacacagcttcacagagttaaacaaatgcaacataaacaaaagtcacacaccttaaaattatattacactacagaaggatttcttgtttctttactacttgaatctgggcttgggaatggaaatcactttggccaatggatcattagtaagtgtgatgtgggcagagtattggtagctggcacattggggtttgtgtcacctgttgctagagccagtctgttgacatccgagcaagcctgggcttgcctgtttctggatgaggaatcagtaatagagaagtctcaaatgtctcagggacatccacagatatgcgggtaaagctagcttagatttctcagtctcaaacccaaagagacgttttcaatacgtctggagaaccatagaaacaatataaattgaggcttttgcgtttgagagatgagttggacagcagaggttagttaatgtattgtctggactcaactctgtcccacagcaaatgaactgagattccagaacttctctatccatttcttcccctgctctccagggtgtgtccaagtgacccatatttagtgatgtggaaaacaaatacataaatctgaaaccaaaagtagccacgaagtattggtaaggagtatatcactattcttcgaaagctctagcaagctggctggaaaggataaggaggtgcaggttgctaaaatggagatgagggtcaagtaaagctgatgcttttgcctgcagaagtctttgatgtcactgacttgctgctcatggtgcactaggagtcatcgattgggactccaggaaagactcactgaagacatgaatgaagatacactaggccctgattgtgggtcatcacaattcaagtgacaacccatgatccaattctcattcttggatgtggttagaaccccgaatggagtccctcggcttatgtgaagagaggggtccctgggaggacacaatgatcttgtcgtgaagtttgtgttgtatatattttcttggtcttcttcatggctccacagaaggaaaaagatagtgattcttgagatgtcgctgactacctgattttgagctgagctgtcgttagttacacggcgggtgtccctcactactgtctcgccagcaaaaacaacgcggcacactcctcaggatccttctgcagtaaagctttaatgcgtcttgagagggagagcataagcttacagagcggagaccccaacacccaaaaacccctcccttatataggctggcaaccgctgcctcggacttgtcacctcctaactggctgaagctcatcggaccatatgacgtcagctcattggaccatatgacgtcacgggagaggcggagaccaagggatggatcttgtcgtgaagtttgtgttgtatatattttcttggtcttcatggctccacagaaggaaaaagatcgtgattcttgagatgtcgctgactacctgattttgagctgagctgttgttagttacacggcgggataacttgtaaactgctattgtgtataagtggagccaaattagctattggctattggcttgactattggctaagtctgtctcacaatggcatcaatattatttcttcagttctttttgaaaaattctgagtgttcatacctgtgtttacacacatgtataatcttaccttgtttagatctgaccctgtcttctttgacctctctgtcctctcactggttcctttcctcccctcaaatagtcctgtttgtgctttcatctctctctctctctctctttctctctctctctctctccttaaatttagattctgcatatgaaagaaaacatgtgttatgtgatattctgtgtttggcttatttcgcttaacatgatattcttcagttcttgaaaacataattagaagagatgtagttggcgtaacccccacacaggctctttgagtaatggagtcaggcttgaaaccttagaaaaggactaaatggaagcctgatgcaatagctggcacacaacaagatgaccagcgctgccaccctggaagaatagacattggtgccaaactcagatacctcagtaattctgagaggatgtgtctattgcattctttcaacttttctgttcagtcaacatagaagataaatagattttaaaaaggagtgagtaactgagtttaataatatgctgaccaattttcaagtgttattatatttttttctctatattatatcattttcacatcccaccggggccacacatatccactgtattaatggcatcctttggcttgggtgtgtttggtgaatacatgaatacatctctttgtggtatataaatcagtgactgtcctgtagcttgatatttggcaaagcttttgagtcagttgatttgagaagttagaagaaatccttgaggaattaaaaaaaaaaaaaaaagaaaactatccacatcttctattccctcttgctaaaaagaaaaaaagaaagaacccttaatttttggtggatttttgtggactttagagagaacacatgctatgtttgaatgcacccctgtgactcagtgcgtaacagaaatgctattcgtttgaagcaggttgaagaagtaaaaggcttataagtttagcctgggataaacaaaagctgattcagcaggtcgagtgctggctgaggtgtcaggtgggtagtgctgctgtgtgtagtctctgggaagccatgatagaagcaattacagtaaggaaatggcaggaaagatctgtatgattttggagtggcatcatgggtctttaagtatattcagttcttctgacaaataggtatttcttgctactgggccatgacagggatttaagacctgagcatgattgtaaatagccgtgtaacctgagctgctctatgtgactttggaattatctgattcccaaagtcgtttgtagcaggatcactgtcaacttaaggtatttgggaagttttaagaagtttgtgttctaaggcaggatctcatgaggtaaccttgggtatcctggaactcactatatagaccaggctggcctcaaactcagagagatctacctgcctcttgcctcccgagtcttgggattagaggtgtgtgctggttgagaagttctaagtcaacaagtgcattgcatgggcattgctacactggcttctcccgctgcagagagagacttctcctgctgcgctggctgctcctgaaacattggcccttctctatgggtcaatggctatggaagttcatacaggtgttcatgagcaattatttggtattaattgagtaagcaggatccatcttgtcttccacctgctttcccatgaggtaggtactatctagaagtggattttggtagcgtagttgcgtactctgttggccatgatggagtaagtacataagaatagattcggtgagtgtaataatacctgatgtctcctttggccatgcggaaggatgtctactatgacttgggttattcatggaagacactgttgtttctttttgggactcagcaggatttgtgacagccatatagagaaaaggtatgagagccaatcctcaaattgagactctaaggagaaagcattcgtcccacatgccaatggtttattgaaggttacctgtttgaagatgtttaagagggtaagatgatcccttttgtaggcagcatttatccttttcccagctactccagtgtttgcaaaatgggccataaatcaagtcaccatgatggcaacaatggagtttaaccatgggctcagcaacatgaacttgcccttaccattagcctaacttgtgctgctgccgggtcctcagcttgctggtgtcaggagccatgtccaagtcatcgcagctagactcctggggccaggttgatgacatcagaacacttacatcaagaagagcacagaattttgcctttcctggaggagacactattctagacacacatttgctgtccctgcttatagaatttgccaggctcagcatctgtggacttaacaaataccttattggccacatggcattctacataatattgtttctaatgggggaactaattttacaatggcaaagtatggtaatactttcatgcttatgagatccactggccttctgtgttgcagctgacagaagcatctgttttataggatggtgccaggctcagcatcagcaagtgtgtgtgcaggaagagtgaatttgagtgagtgaagagctgtctcacagagtgcatcacactttgaccccatggtcaatccacaatgcatgttctcctctagctagattacagttgtgcaggagctaagagaggacaaggaatgatggcttcttgcaagttttgtcttgatcgtcatattcctcacagacagctgtgaacgtttgctttccatgtcttcagctttaggttctgttgcttgactgatccattttccagtggaaagagtttgttttaatgaacactacaatgcatgaatgttcttatgttctcccgatgtctcccaatgtgaagggcagttgctgtgctgtttagagcggccactcttctgatagttttgttgctttaaaatggggccagtaaaatgtatgtgggacccaggggaatctttggggattctggtggtatttacatgctagtaaaacattaggtagaaaatgtcagaacttttaactgtcagggatgctaaggccttgttcagagccctcctaaataaagtttcaggttattgtatgaggtcaaaaggatggccaattgcaaagatggttgaggacaaagggcatgcaggccaagtagcgaaatgaggtaaaacatcaactctgatttcaggatcagttgtagaatggtaattgtagtagtcatccacactttcttatggctatgcatgcatgtcttcattcacctgtatgacacaatgcgcaacttccactcccccttctaaagtacccttgtggtgatggtattaaccagggttacatcactgtaatgaaacaccggaagcaactgacccatagaaaatgtttgtttggttaatgtttctggaacttccaacccctagctgggtagccccattgctttgagccagtggtcagggcagcccaccatggcatgagtgcatggtgaggcaaaccattcatatcacgagtcagtaaagacacaaccaagagaacaatatctagtagcctaaggacacggtactaggttctatcttccaatagagccaacacgggcgctatcagtcagatttctctaaaggaatggaacacacatatgtacacacacacacacacacacacacacacacctgtgtctacatttacatactaaaaaaaaacaggcattaagccttctctagtcttgtcattttcaaatgaaggcttagaggaattcagtattttccttaagttccttatcaaagtattagagctggactccagggccccagtgctttctggcactgagttgtggcttctgagctggcaactggcagatgatcagaaagggggtgagatacctgagcgcatgagtgtggagaagagggactcatgaggccctgtgggggacaccttgctcgcagatttcagctgtcctccttcattttcagcttcatgctgttttctttatgtgtctgttacatggcagctgggtcccccaaagcctttggttgttaaaaacacagcccagagttaggcagtaattaatagcagacccagagaaacctcaggggcaggccaggcaaaacctacagtcctgggactcaaacctccgaaagcccaacagtgcatcacagaagggccaggggagtgcttcctgagaagaaagtgagaccttgctaggatgggcacattgtccagaaagagtggagaatagaatggtcctttaggaaggacggcttggggaaatacttattctgtgagagacaggtgtggagccaaggaaaaagtagggaggtagtttgggtaacagtgtagtgtcagtgaggtggcctggggggggcctccctagggtgtctgagaggttaggagttcatctctcagcaccactatctctacttttttttttttttttgagaaacagtataaggcaggagtgtggttaatggttttgtgtgtgatctcatttagcacctccacagtctggagggattaaaggattcacacaaagtcagaaaaagtcccaagtgatggcaggaccgggacttaacgctcgtctctgactgcaactcatgattccagccactgttggcacataagcagtggcttcctctgcttcttagaccccccccccccccaccgctgcaggaaggcttcactttctattataaagctcagaacaagaccatctggggtgctttgtgttagctcatgatgggggtgggggttgtctttctggcctactaaggtgtgtttcacttatttggtgccctcagtttaaaaaaaaaagaaagaaaagaaggaagaaggaaaagaagaaagaggagagagagagagagagagagagagagagagagagagagagagatggaggggagcactttgtctgggtggtcatgtgattcagcttcccttggcctctaagctttgaagggttaactcatctgtgtctgtcggtgaccccacccctcccttggcctctaaactttgaagggttaactcatctgtgtctgtcggtgaccccacccctctcacctgacagtagacagatacaaaacattaataggttttttgaaatattaatgacagtgtcaagttaaggagagatcaagagacctgagacatgaaattggctcccagtatactcacctgctgtgtctgaagacttctgtcacctcaggtgacaaacagacatgccaggaagaccctcttggccaagtgaaagcaagtgagggaaatagtgctgcactttcttttaaaagtaagaacggtaagctaggtgaaagctaagctagctgtgatggtacacaccgggaactgcagcatgctggaggctaaggcaggaagatcttgagtttgaggatagcctgggctgcctgcctagacaggctgaaggtcatatcataaccaaagaaagaaagaggaacaacatccttacagaatggcagcaaacaccagtagatgtctgttggtgaagctaagatgatgaaggccacaagccaagttttattcttagtctggcctagctccccctcttactggaccaaccttcaggctggagcagaacaggtcacttttcagactcctgccttggagttttatgatgccctcaaagtgtgttgtgtagcaaagcaacttaaaatgcaagaagtttaaccaaagctataaaatactcccttttcggttttaggaaagctggaactatttctccctagctactcatgttttatgtattttaaaagataaaacagagacgaaaactagtagcgggcgtctgtcccacacatttccctcctctgacgtcctcgggatattttcttcttggttgttatgttttttcggatcacatacatctgagaattaaaggatacatgctccctccgttaactgccacacagctttctggatgcctgtaaatagaggagggtgagaggaatgggaagtgtagacccctagcttatattttttatgttcctagtgcggagtgttgttgacgggagccccacctttctccaagctaaagacttgttgagtcgtcagaacctagtcatagtcccagtgaacactcaacctctgactcagcgtattttctgtgttcattttgtgcatggacaggagacttagtctccaacactctgagaagacaattgacgggaacctggtactggtctgcaagacagggtcatttgccccaaagaagtgaggcaagagagtgttgagcaggtttccagaagctggacagatttgtagcagaaactgtctttgatgaaatgtccctcagcagcattgtgggtgttgaggagggagctgttcagctcctgattgcaaccagaccattatctgtggttttctgtgataaaggcaacacacaatttcttctcctctgctagtcaggagttgttaagctttccttgcagggtcattgcgaagcagatagggtggtgctccggggggccccttgggtaggcagagagtggtgagcctggctatatagtatgtgtatgatgatctgtcacccaccacgtaccacttgctttcccttctgaaaccactgtctttgcatgatccttctagaatgctcctcagactatttctgcctgttacaattttacttatttgttgttatgcagctcaaatactccctgcgttggtccaggctatttaacaaaagattggatggcttttaaacaacagaaatccattttttttttccccgagacaaggactctgtgactttggaggctgtcctggaactagctcttgtagaccaggctggtcttgaactcacagagatccacctgcctatgcctcccgagtgctgagacaaaaggcctgcgccatcacggcctgtccagaaatccatttttgttcattccagagcatggaaagttgtagcatgataaagtgttatgagagccttctaggttgcagattgtgagcttcttgttgtgcccagtatgtcaagaacacaggagagaagtctttgtagagaccccttgaatgaggacgctatgccagtggtgtgggccccatcctcagttaccttccaaagatgccactttttagtcctatcacatcggatgcaagaattccaacacttggattttaggaatatgcagacatttggttcatttaaaaccccttctaggagctttgtaaaaaccatctcttactgggagcttctctcctgtgaacttgaccagaaacagacctgttgcacactgggctccccacatctatggtctgctgacatgggcattcatttgctgtcttttcctttcctccttgattttaagcgctagagagatgggtctgcatcttacgattaaccactgctagactgcatccagctctgtctcagttttcacggactcggccccagtcttcatcctatctcatgtggtgggggctgttgatgccttcccggttgaccatgtttactctgagtctacctgttccatcagttcatgcttgattatgttccagggcatccttgtaagatgaagacccgttcttgttgaagcttggtaaactatcttagtacaaatgtgcttccatctggcatcttcgctgccgtgctgtgcccttcccctgaggacatttatcatttcacactgtggaaccacacatacttcttcaggaatattccgagattgttcccagttcgtcaacgttaacctcactgcctggaatatcttttccagactcgattgcctaggaagtgatcatatttggaagttgaacacaaacatgaattgcttggatcttagtggaaatcttaatgaagttaatgacaagcatttcagaggttcgttgtataacatgcactggtttgaattccgatggcctccacagactcatatttggatgcgtagggagtggcaggaggaggtgtggccttgctggaggaagtgtgttgttgagagtgagctttgaggtttcaaatgcctaagtcaggttcattctctctctctctctctctctctctctctctctctctctctctctctcttcctgctgcctgctgatgcagatgtaaaactctaggctccttctccagcaccctgtctgcctgtgtgctgccatgcttcccaccagcatgacaatgggccaaacctctgagaatgtcagccagccccaattaatgttttcctttagaggagttgctgtggtcatggtgtctcttcacagtgatagaaatccaaactaagacataatacatcccttatataaaaattacataaggcaatgcacatgaagagtttaatatagtacttggcattacgactatctctatgtgtctattatttttctcaagaactataatggtaggattccctattttttaaaaaagtcaccattggaattatctggtattgcctcattgtttaatgttccattctttcttgacatcctttatgaagcatctcccaatgactttagccaattttgttattattttttgactatttctctgttctagtcataggaatataggaggaaaagagggatgggggacagtcacattatgttttgagctggcagccccagggtagcaagcagacatatccaaaatcctcctcgtggagggaagcagatcttgattttccccttaaatggggcagcaattcccaatgaccttgttccagttgattagaacattagtgggcactgaccctagggtcaagtcaaaggaagtcagagaacttaggagcagctagttggaggaatgctacctcaacatggatcctggcaatggagaagacccgtgggattctcccttttgaaaatttgttgaaataggcctgtgattacaggcagtgataaaaattatgcctgatagttcctaagtaacagagtcaccatgtccgagtgctgagggatatatgacagtcttgctctcagaactccttttatttaggccaggttaacttggaacttaataatcttcctggtccagcctcatcagtgcttggattcatgtgtgcaccaccatgcctggctctgctacactgttagtgaggcccagattctcattttcaatgggattctcatgttcttatttatacccttatagtacgtccctggcatgtctttaaggtaatagggacctgcaataattaaaatactgcctatatagcaagaactccctatagagcaaggatgcctgtcttattgcactttggtaaagatgatcatgtagtatgttccaataaagtcttgttgattgagcagttggtgggataattagattgagcattataagaactaaggtctttactttcggagctcactcttcttgaaataccctctagggactttagtttagatctggttgtgtcataggtgctgctcatagatgcttgtgggcaaatggacttgctctgttcatatggacccactactcaacaggtactggcatagactgactgaaggaaggcaggcattttttttttttttttgtgagctgtaatttatcacaccagcctattttgattgtaaaatctttggaacattcttaatatatatatatatatataatatatatatatatatatatcataatatatacatatgaattataaacaagattgaattacataacatcccagttcccttctccctcccttcctcctctaccaaccccccaactaaaatcctacctgtcatctgtcctttcttctaatctacacctgactcaaaatttctgcttcctcatgacctctgcatccttcctcttcttcccttctcactcttgagctccctcccccctcttcccatgctctcaatttgctcaggggatggtgaccctttccccttctccaggggacaaagtttgtctcttttagggtcttctttgtttactagtatctctggcagtgtggattgtaggctggtaatcccttactctatgtctaaaatccacatatgagtgagtacatatcatgtttgtctctttgtgattgggttacctcgctcagaatggtttcttcgagttccatccattttcctgcaaatttcaagattcctttttttattttttctgctgagtagtactccattgtgtaaatgtaccacattttctctatccattcttcgggtgaggggcatctaggctgcttccagtttctggctattacaaatagtgctgctatgaacatggttgaacagatgtccttgttgtatgaatgtgcttcttttgggtatatgcctaggagtggaattgctggatcttgtggtagactcattcccattttcttgaggagtcaccatactgatttctaaagtggctgtacaagttggcactcccaccagcagtggaggagggttcctctttctctgcatcctctccagcagaaactgtcattgatggttttgattttagccattctgacaggagtaagacggtatctcagagttgttttgatttgcatttccctgatggctaaggatgttgaacactttcttatgtgtctttcagccattttagattcctctattgagaattgtctatttagttctgtaccccatttttaattggattgtttggtgttttggagactagcttcttgagttctttgtatattttggagatcagccctctgtcagatgtggggttggtgaatatcttttcccagtctgtgggctgtcgttttgtcttgctgactgtgtcctttgccttacagaagcttctcagtttcaggaggttccatttattaattgttgatctcagtgtctgtgctaatggtgttacgttcaggaagtggtctcctgtaccgattaattcaagggtatttcccactttatcttctaataggttcagtgtggctgggtttatgttgaggtctttgatccattttgacttaagttttgtgcagggcgaaaggcttgggtctatctgtagtcttctacatgtttgcatccagttatgccagcaccatttgttgaagatgttctctttgttccagcatatatatttggattgtttgtcaaaaatcaggggtttgtaggtgtatgggttaatatcagagtttaactctattccattggtctacctgtctatttttgtgccaataccaagctgttttcaggactatagctctgtaatagagcttaaaattatggatggtgatgcctccagaagttcctctagggttgttttgtttctcaatataaagttgagaattgttctttcaaggtcagtgaagaattttgttgggattttgatggggattgcattgaatctgtagattgcttttggcaagattgccatttttactatgttgatcctgcctatccaagagcatgggagatctttccattttcgggtattttctttaatttctttctttagagactcaaaattcttacgttacaggtctttcacttttttggttagtgttattccaaggtattttatgttgtttgtggcaattgtaaagggtgatgcttctctgatttctttctccaccaatgtgtcatccgtatatagtaggtctacagatttttttgagttaatcttgtatccggaaggcaggcatttctatgaattcttctggtcttaatttttttcttaaaataacattgttaatattaattacttactgctttgacagtatgttatgataaatctttctgccaaaagccatctgatccccacctccacgtgtgagctttacgccagccacccacctgagttaggcccaaattaatgcacagaatcttgtattaggtttaaagctgcttggccaatgactaggattctcatctgttagctcagtcttaactatcataagcctatatattttataagacttatcttatcggacgccttattggcatccctccttgctggtggatcacattgtgccgctggagcaggagcagaggggaaaagagagacacttcctgtttctccttctttaaatatgagtctccttgctatgtcacttcctgtgtggatcatcacttctctactacatttcccagaattctctttgactcctagtcctgcctaacttgccatttcattcactttattaaacaatcaataggataaacatacacagaagtacttcccccatcaacagtaatataagaatcaagttttaaaaggcttccttccctccttaaaatagatctgataattttttttaattttagttttatttgaaaaaaggtctccctatgaatctcaggctattcttcttttttttttttttttaaatcccaggccattcttgaactcactgttggaaggtcaaatactgaagccatgataaaatgcagaggtgtcatagcgcaagtgtctgccacttgcagggattgagctaagagtaagaatctgaaggataagaaacagggtaggttagaagtcaccagaaattctcagaaacgttggtaaatgaaaacaaaagctaatcagctaatcagctagccaaccgaccgactgaatccccaaacaatctgactagcactgaaattggaaaagagctccagggccttcttggaacatggtaacaagttttccagtaccacatggtaattcacagcagatcacaggaagacctccaaccacttctgtgctggaaagaacgaggcctggagggggacttggtgacactggagggaccatcctaagtacttgagagtagttctgttgttgaagaggtggacacatgggcactcagaatgtcctcccctctctccacctctctcgagttagtgagaaacaggcttgcagtgggatgttctgagatgtcctaggccaggcctcactggaggaatggagagatgaagaatccctctgcccaagcctagggttattcttgataaagcatctgttcatttacaggagtaggacactgttgacttctctcctgaaccgggtgaactttggctcagtaagcagtggctggcaagcacgagcgatgctttcacaaagacggctgacttgctaaaattagtgcagtgtaatcatgacttcatgttgcccaatataatctgtcttgtacagaggggatgaggattttcagaccggtttttagcagcatcatcaagaagggtttgtaatcagctctcaaccatgcctcctcggggagaggagctgagtgtggttcacgtagatgacatacaactccccaatcctctccatttgattttgattaatgtctgcatcttgctgcaaggcaggtgttcctagccctctgggaattcagatcatttcagcctcagccctgaaggcacaaacaaggctggaaccacctctagaggcctgggaagtcaagcagtttcctccagagggagtgggaaggaatccttcccagctgtccttgcggcgacaaagggaatgcattaattgtcaagatcgcataaaacattactacaccaacagagaggattggcttgcatctttctccttcagagaaggctaagcactctgcttcagatgaacccacactacaagggaaagaatgaggagtagggacgtggaggtctttttgtggtgacactgaaaagatttaagtttaaaaaatagaacacacgtgtttcaacagtttcatacatgtaaatgttttgatcatatgctcccaaagcccccctctcactctccccaggcaccccaacacatctgtgtcttccctttgtgttctttctggttaccaagccactgcgttcaatcagtgctgcctgttggaatgctgcctgatcttgttgatgccaccatatgcggtaatcatagctgtggggagttcatgggtgcaatgtgagtgtcatgctctgaagacagtgtttcatggctcccctccccatcctccatccttttctgaaaaattccctgagcctttaaaacccaaacagcttctgaatcagatcagtacctttgaatgtctgcaagggtactgacagtcttcaagtcacgtgtccactatggaatggctggggtcgtatcagtgaagaatgctttcctgtcatactcaaagctctgagctaacaggaagaaaaagaatccatttgccacatgattaataaagtgattccatgctttccttagttattctgtataatcatgaaggaatacatatagtgtgtgctctctacacggtctcattctaatatggagaactattgacaacgggcgctctaaacatggtatcatgctaatatggagaactattgacaacgggcgctctatacacggtgtcatgctaatgtgaagcactattgactggggctggggagacggcctagttggtaagactggcctggtagacaagcgtgaatacctgagtccagttccttgtcacccacacgaaagccaggtgtggtggcacctgtaatactggtgctggattgagggaaacacagactggatcccctgagatccatggacagatattctagacaatcagtgaattccagattccatgggagactctatttcataaaacaaggtagggagtgctagaggaagacactcgaagccagtcttaaactttcacgtgtgtgcacaatcatgtgtacatgcatgcatgcgtgtgcgcacatgtgcgcacacacacacacacacacacacacacacacacacacacacacacacacagagagagagagagagagagagagagagagaactacttgacctttgcttgatttattttatcaataactaaaaatctagagctaacatagactgcaagctagtacataactaagtgggcataagcctgaatctccatactggagaaatagataaaattccgcaaaggaggtctatgaagaaaatacaccaccaatacttatggcttgggcaaacattcatatctgaaattgtcagcctatcaaaagccactgaatgactctaaaataggctggtgttggtatagagtacttgcctagcaagtgtacacagggccctgggtgtcctttaccaaaaccttccagtctgggaagatggctcagttggtcaagtgcttgtcctgagtgtagaagaagctgagtccaatcccttaaacctcacacaaatgcagccattggaaatttgaagccaatgaagcaaattaaacttggagtctactatgtctgtgcattgaatatccagcccagaggagctcacccaactctgctctgcactcatcaagaattgaccttgcacatgggccaccatctttcatcatacttcaaagagtagtcaaaccatataactgagcacagtatactcaactcccatttagtgatttttagtagatttaagatagtaatgttcactcaagccatagcttatatagtgtattttcttcctagacttctctcatggaattatatttatttttccaggatgatgatgtgtgcttatacccagttagttatagactagattgcattctactaagttccatccagattttttctaattgataaaataaatcaaaacacgatatatcaaatgacaaaccataacaacaataatgggtgcatgttgcctgtaactagtttctcagcaaagataccagtttttattcaagttatcacctgtatgagtccttgaaggctttgacactccaagacacttcttatactgaagaagcttttgggttcttgtcaatggctcttttctctccctactcatctctgggttgtcaagcagcttatctctgtcaggagtggcagccctagtggcaagcttcaggttacccttctaatcactactctacatgacttctccaagcaaacagtgagtcctacttgactcaggccaagaggctgtattgattactaactttagacaaacatctggttttcattacccgtggtagcagaccagagcgggttgctgttctgactggtgtggtcactcaacaaccatcaggactagctataaagaaaatttaacatatcctgtaattacagtctgcccagcatagagtggccgaggaatctgcagatctgatttcagggtggggaaaaatgtttattgtatctgtcctacacatttatttactctgaggtcaaaggtcggctgaaatacggccaccccgggcactgatgctcctgcaagggcagaccagcttcttgtttaggtcaggaagctccagcgaggctccaggcagatggtccctaatgcttttacagacttcggaatttggcctgatggaaatgacgggcggatcttgtccggagtaaacaaatccttaccctccacagcgccacaggccccttcctggccctctcctcaacattctgatggtgtctttgaggactgttaactgtcccctactagctacagcatgactgaagcagcaaacggacactgggcgtctcagcacttccaacacatttctcttgcaccttcatgactcccgtgggtgtgagcaacaaaggagctggggttgaattgttacagatggggaagaatttgtgtcctcagcaatgctagatgaggaaaaaacgttttctctgctgttcttcctatctggaaaatcatgatgtagccggccaacccccgctccccagcatctttaggatattttttctttcataatattttaagtagactgacctctgaattgtagtgacagttgctgcaaggagcctaacatggtggattactaatgatgcttttcatgttgctttgacacaatcagcttaaggaagggcttgctttggttcacaatttgatggtacagtctgttgtggcagggaaagcatggagcaggagtgttagcagctggtcacatggcatctccagtcaggaagcagggagagatgaacgctggtgctcagctcacttttcccagcacatcggatggtgccacacatgtcggtggattttccctcctcagctaggacttctggaagtgcttttatatgtgctcctaaggttatgtgtttcctggcaaccctaaatctggtcaagctgagaatgaagattatccatcgccaataggaaccataaaaggttaagaacactggctgctcttgcagaagacctaggttcagttcccagcacccacacggtggctcacaaccatttgtaattccagtttctgaggatccaacgccctctgctgactgccataggtacttggcacacatatggtacacatacatccatgcgggccaaacactcatacacataaactaaaatcaaataaatctaaaaagtcagaactgtacactctagtcttcaaatgcactaaactctatggctgagacacttgtgaagaaatgagaggaaaccaatctaagagtataaggaagacgggaaagtgtggggatcaagaagactatttggaaagctcacgggtgctggcaggggctgggcttacccggtaatgacaagtctttactccaactgcctgagccctgccatcatgtgggcactttcttccaggctgcccgagttctgcccaccaccacgttaccaagtaatgtacagagacttatattaggtacaaatgctgcttggccaatgactacgatttctcatctgctagctcagtcttaatgatcataaatctatatattttatgagacttctcttattggatgccagtggaagcatcctgtcttcctgggctcacatggtgactccagaggagagaccaggaggaagagcaagagaaaagagaatgacttccttcttgcccttgcttatatatgagtctccctgctatgtcacttcctgcctggatcaccacttctttactacatttcccagaatcctccttgactcctagtcctgcctaacttgctgcctcattggtcaaacaatactttatttattatccaataagacaaacacatatatagaagcacttcccccatcattacccacaactataaagcagaggtggggaaatctcttgacctcttcttttctaacacttaaatttctttaactgtctcttgaaatttgatgagcatactcaaataaaagtttaaaggtttaaaaatttttttaactgtgtatattcatgtatgcctatgaggaaatacgtgtacatgagtgcaggtgccaacagaggtcagaggcataaaattctccctcccctattcccagacctgaagttacgggtggtgtgagccacctgacatgggtacttggaaccaaagttgggttctctgccagagcaatatgtacttttaattaccgagccatctctctagcccctcaaagggaaatttaaatgctgtatttctgaagaggaaatagcatgtattaataaactggttagggaagtttgggagcagacagtgttctcacgtagagaggttaaccaccaaagagagacagccatggaggaagtaagatctggaagctggcccgtcagttgttggcaggcctgagggaaaaactatgccctggtctctagggaagcacccacagtttagattattacagatgatgtgggttgccacagggaggaggaggaggcttggactcagttaacagaaagacagcccagttgggcatgtgggcagaccattgtagtcccagctgtcaggatgctgaggcaggaggatcatgagttcaaggccaggctgagctacatagtgagacccccatctcaagcttgccctcaccactcaaaaccactctaaaaaagcaataaaacaaaacaacaaaacaacaaacaaaaacaaccaacccccccaaacaaaaaacccagcgataaaatacactattaccatctgcattaatggatagtgtttgataaaattctagaagattggactgatgctgaaaccaaccagtggaaggaggccaaatagctatagttggaggaggagggggagaaagaggagggggaggatgagggggagggaggagggggggagggagtgctcggagattgcggtgtctgacacatctaatacctctcaaatcatcgctgaaggaactgcctccttcatttatgaacatttgatgggaaagctacaaggtatgaaacggccatggaaatgcgggtacatcccttggtgtaggtgcacgagagagaatagatgttggagtgattttagttcaggaaatgagaggtcttccaactttgtctctttcatagcagtaattgcaaatattccaggatctttggaattcctctatcattaaacaaagaaaccatgtttcccctgtggatgcatcaaggaaacattgttcatgaataaaagtgtgaccatggtgtacttaattgttcccctgtggaaaatatccatgtgtttataatattataaacactgactaccgataaagtgagagaatatggcataactagtgtattaatttcctaacgctgtgtaacaaatgaccctagacctagcagtctaaaacaatggctttcattagcttatatttctgtcggtcggaattcaggggcagagtaactcactcctctcttcatggtctcacaaggcttaagccagagaatcatctggcctgacttcccttttgaaagcccctggagaaggatctaatcccaagcacattgtgattgctgctaaaattgagtttatagtagttggggggatgggggccttgctttcctgctgacttttgggtgagggtggctttcttctccaagagcctgcccattccatcaggggttcacacatggcttgcttactttatttcctgtcaaggttgctggagtatatttcaacatcttggttcttatgctcctacgcagagaaaacatccctccatagggctcctatgatcaaatcagacttaattatgatttatattaatgtaccaagtgtccccccccaaaaggcttatgtatggaaggcctagtcccagctggtacactatgttgtgagattttggagacaagaggagacttaacaggagcacgtggacccctggaagcatgtccctccgcttctgccctctttcccccgtgaggcagctgactctgttccttcctgtcctgccccaccgtgatctgtctcatcccagcctagaaacaatggacccacaccactgtagctggaaacctccgctatagtcagtcaaaactaatcattcatacttttaagttgctctgtcagactgtttgtcacagcaacagaaaactgactaatgtggaaaattgttaacaaaggagtgcagttgtttctgtggctgaacccggtcattttgttctatggaactgattgttttaaaaagcaaggagaaaaaacctggagatccaagagggctagagagaccctaaaatgccatgagctcagctgaatggacacttctggtgtgtgctcagaagcctagaatatggacaggactgtgggcggtgaagactcttcttttcatgaggtttcagatggcaatgggaaatgtagtttttaaattggatgagaggccatttatattacattgtggcaaagaacttgcctgcaatttgcctgtatcttcagatcttgtatgaagctgagtttgactaattaatctggtggacaaaattttaagtcaactcagccttcaggctgtggcatggttattgtttgtttctttaatccaggtttatggtgagatttttggagaaagaaacatcacagagaggtttgaagaatttgaagtttggccagaaaattacattataaagttagggttaaagaaggcatagtttctgaaaatattagtgccataaaaaagagggcatatattttgctttggggcactaggactgagatcttgagggtgtcccaaggattagacagaccttattcacaatagattcaaggatatgaaagtaaactcttaggaaagactttgagaagaacacaccaccagggaaccctgttatgagaatcccaccagagataactcacgcagacacagtttatagccagttgagagtctttattccatttggctggggccacaatcaggtattcagaacccaagtatatcaaggggtttagaacaaggggtttttttgaaggcaaaaatcacattttggtatcttgcttggtagctgcaagaggagcttctgcacaagcaagcagtttaacagaagctaagataagcaattagctgaagggggagcttttgcaaaagcaggcagtttaacagaaaccaagataagttggctgtggcattttaaccttgtgtttttagaatagagttgggaaatttttcatggggcttcccatcaagaagatcaaattccagtcaaatctaaaaatggcttcatcaagaatacaagatggaggcacctctgcagtgtcttgtcctgtcacaccccctactcccaagcaccatccaaagaaatatttatccaaggtctgctgcccagacacttgggaggccactgtgactatggtccaaggttgcccagacagtggtatcattcatgtgatgttggttttgtagacatatagactgtaaatgttgtaggatgatggagactcccaccaagactttaaagcttatgcaactgggcagtgtgtagttggattccctaggagcagctccagagaaaatgggtgaagctgaagattcactggacgctttgggagactagaggtgtgaggaatatgcaatgacaaagggcacgtctcggcacctcaatctcattctttaaaatctgcacataaagtacaatggggagcggggagatggggcagggaaactggaacttaggctgtgtgaaaaagccacagagaaacctgttacttagtgaactaattaagaataaaattgaagaataagtctgaacgaaaatactctgtgtaaatgctaaggtgctcccaggatccatacattattaaatgaaaaccccagcgccaggatgggctacttccctatgaagtcccagtggtttgggaggtcccagtggtctcccaaacaatacaggctatttccacatatgctgagggttgccctatagaactagattataagatcctaatactgggggtaaagagagggctcaatgggtaagagtggttacacttgtagatgacgttggttcagttctttgtacccaatattaggcagctcataactgattgtcactctagttccaagggatcctatgccttctggcctctgaagtcacctacactcatgtgatgcacataaactcatgtatacacacacacacacacacacacacacacacacacacacacacacacaataaaacaaataaaaatcccgttgctgaagatgccacatactttggccacagaacatagagaaatcaagtagaaactgatctggaagcttcctccccaatagctagactagaaagtgctatgtagattgctgggggataattgtcatctacagttctactcatccacgaaccccacatgctacactaacaacctgcctggcaaagacatgccttctggcttaatagttttgagtctgtgataggagtaaccaaccactttctttctttctttctttctttctttctttctttctttctttctttctttctttctttcttttcttttttcttttttggtttttcaagacagggtttctctgtggctttggaggctgtcctggaactggctcttgtagatcgggctggtcttgaactcacagagatccacctgcctctgcctcccgagtactggtattaaaggcgtgagccaccaacgcccggcaccaaccactttctgattggagtgtttctgggccatggttattccacatactctggtgaggaggggcaaaagttgtttacaggggtctgacctcctctcctggctttgcgtgtgcacatcaggcatgtgtgcagcgcacatatgtgcattggggcagggcactcacacacagtaaaaagttttcttttgcattccttgtcagtgtctccatttactttaccttcccacctagtgttcccatgtcaggctccttctctgtgcacattcttttgcttcctgctctacgactccaattgttctttcagcatggatgactctcgagtctatcttcagcttggcattctctcttgggtttcaactcacttatcagttgaccagatagacacgaatccactggtgagacctccatacattccaaatgctttgtgttccctccacactcccttcccttctggggtccctcacttggtgagtgatgctgcctctcatcagctgctcacgatagaaactcgagatttacacagaacttctcctgttctctaagtccagggacattgtctcccaaaacacctgtctattactgcttccctgactgtccaggaccaggaagagtaccaggaagctgccatcttacactgccgtgacttccttcacactctcctattcaacttccctcacgttattttcttcttcccttgttttattcgatacggggtttctctgtgtaaccctggctgtcctggaaatcactctgtagaccaggactcaaactcaaagaaattcacctctgctttctgccggagtgctggcattaaaggtgtgtgctgccaccacccggctagcattttctttctaacaaacaaatcttatgcttctttccccccattcttaaatccagctgcaataaataaaatgtaacattttcttcacgatccagtatatactgttgcctcccttgagttttcttttaagaattgccttgggtgatagctctgcaggtgaggtgtctgcttgcatatttgagatcctgggttccatccttagaaactatgaaagacagtctagacatggaaatgcaggctcctaatccacagctggggaggctgatcactgaagcttgcaggcggcagctgagttacgagtgagctccaggtcaatgagagactctgtcttcaaaaaccaggcatggagggaggcgactcaaaggccttgcctgtccctactgaatcctttgatagtatcaaggagcaggaaaatcacgactttcagttgtggaccattgatgacccatgaggctctaatggatacttattatccaacagtcacacatatagtcctggtttaacctaaaggcgtcacagaataaaaccaagatgaatgaacttgcgaaaggaacaggtagggatgagggggatgggagggagatgagagggtgtgtggggagggaagttaggacacacacacacacacatatatatatatattacatatatcatacatacgtgtgtatatactgtgtatatttgtatatatacacatgcaaatgagccttgcagatgttttgtaaaaacagaataactgaataaaacagcccagcacataaacacacagcgccttctcatgggtctctgcccatgtgctgcttccctggtacctggaagaattttctccactatgctttcaggcatcttcctccatgcccatctctccccaggtgggtaccagcactcctctaatgcagtgcttagtgcccgcctgcaggagtgccatgcccgcctcacactgttattgctgggtgctcttttcggttcgctgtgaatatttatgggctggggggatgactatcctccttacaattgttgcaacctccaggcctacacctgccaggtgctcacaatctgcttgaatgaatgaaaggcaagcaccatgataacctctcctagtccttacttgggagactaaatggtgagcaaatttcaaacttagtgactgctggtgaggagtagagctaaagcggaagccacttccctctttctttggttccaagattggaacaggagcagggaccacttcctttcaccagtcctgagaacttccacccagccctgaccaccctgtctctcctctgtgtcttggctaacttcattttttttgagaagatgacagaagctgaagaagggatgagaaatacgtgtgtgtgtgcacatgcatgcgtgtgtgtgtgtgtgtgtgtgtgtgtgtgtgtgtgtgtgtgtgcacatgcatgtgtgtgtgtgtgtgtatgtgtgtgtgtgcacatgcatgcgtgtgtgtgtgtgtgtgtgtgtgtgcacacatgcatgcgtgtgtgtgcgtgtgtgtgtgtgtatgtgtgtgtgtgtatgtgtgtgtgtgtgtgtgtgtgtatgtgtgtgtgtgtgtatgtgtgtgtgtgtgtatgtgtgtgtgtgtgtgtatgtgtgtgtgtatgtgtgtgtgtatgtgtgtgtgtgtatgtgtgtgtgtgtgtgtatgtgtgtgtgtatgtgtgtgtgtgtatgtgtgtgtgtatgtgtgtgtgtgtatgtgtgtgtgtatgtgtgtgtgtgtatgtgtgtgtgtgtatgtgtgtgtgtgtgtatgtgtgtgtgtgtgtatgtgtgtgtgtatgtgtgtgtgtatgtgtgtgtatgtgtgtgtgtatgtgtgtgtgtgtgtgtatgtgtgtgtatgtgtgtgtgtatgtgtgtgtgtatgtgtgtgtgtatgtgtgtgtgtgtgtatgtgtgtgtgtgtgtatgtgtgtgtgtgtgtatgtgtgtgtgtgtatgtgtgtgtgtgtatgtgtgtgtgtatgtgtgtgtgtgtatgtgtgtgtgtatgtatgtgtgtgtgtgcgcacatgcatgcgtgtgtgtgtgtgtgtgtgtgtgtgtatgtgtgtgtgtgtgtatgtgtgtgtgtgtgtatgtgtgtgcacgtgtgtgtgtgtatgtgtgtgtgtgtatgtgtgtgtgcacatgcatgcatgtgtgtatgtgtgtgtgtgtttgtatgtgtgtgtgcacatgcatgcatgtgtgtatgtgtgtgtgtgtttgtgtgcgtacatgcacacacacaagtgcagaatatcgcagaatatttgtatatgggcaaggaatgaatgttacagcttccagggtggcaatattatctctctaattccttggctccagttcttttatgtctaatgtgtaacaggatggtctctctctctctctctctctctctctctctctctctctctcttgagacagggtttctctgtgtagccttgactgtcctggaactcactcttggtctcgaactcacagagatctgcctgcctctgccttccaagtgctgagattgaaggtgtgccttttcttgacaaagtgctgcttgagaccagctacaaagagacacaccagctttggacactgtcgtattttcatccacaagtgtgttgagctgcgttcatagctgtgctgggatggatgtggcctgcagatgtgagtgatttgtagactccattggagggtgaaagtggggtgggccccttgttaaaaatatgttaagagcctcctggaggaaagcttctgagtgctgggcttattgtgaagtgtggagctggctctgctgctcctggctggggaacgtaagagcccagctttggaaatcatctttttctcttttcgctcttatttctttttatttgtttatttagaagttcctgcaactacatttgggtatttaaaaaagaacaagaatgtccacgagatggttcagcaggtaaaggtacttgctgccaagcctaaggaccagagttcaaaccctgtaacccacaggttagaaggtgtaggctgactattgctagttgtcctctgacctccaaaatataccatgccatgtcatgccatgtcacaccacacacacacacacacacactgtaataaaagttttaaatgacgaagaaaaataaaaacattgacatgcccattctctctgtatagattcctttgcccctagaactaacttattattatgataacaaccagagcttatcactctttaggtctctaattttgctatctattcttaataaacacaagtaacactgggtattatgctaagagtgagggctacaacctggtgagatccaggatagcgctgctgcaagggagtcctgctttagccttttgtgttttgacacattgtttatattttcttcatctcaaatgctacctttgtggactctgtaaacaacattttttctcgcattttatttactgcttgcttcttgtgtgatgcaaagtactggctctctgctgtaggcccagttccctttctcgaggataagctgcatagcagggctgggggcttcatgggccaactgagttgtaacttttgaatgctttaggttcaataggacctggagaccctggaaggcagggctctagagagacagagtacttgtcggaattacgttgatctatatttaaaaactcagagaacattacactgcaaacgccacactggagagctacaaagagagaccgtggggagagcgctgtgcagctatgtgaagggtttaataaaacaagagagtatagtgaacatttgccaaaaaaccagggtgtggttcacagagtgggaatctggagttgtcccacatggttataataattaaaacattaacagtttgcatgctggccctgctttcatgaaaatgaaaatccaactaatagagcatcagccttaggtgactatgagacaccccagagggggctggggatgagtggcagggcggtagctcagtgctaatgaacacgcctggtccacagaagggtctgggtcctatccccagcactgccaaaataaatacaaaatcgaaaatgagacccatacagaatttgaaatagtcaaggaaggctgttgtgaatggtgggcctatctgcaacaatgtaaccacataacaacggccatagaagagcagcttgggacagctttgggcaggtctttgatctgcatagacggaaataaaagaagcctacatacctgtagttgcctgaccagacgtttgcagcaggcttctctcagctcatgtagacaacatggctgaaaagggccagtaagagctgccagggacaggaaccgctcactacgggacttgactcatgcccctagtcactctggcctaattactgtccatgataagagttaactcagcgctattgagccttgtgtcgggtctcatgttatagaaacatcccctttcagatgggaacggaggaaaggctccaaaagacgccagcagaaacagcctagacagccaatctgcttcccaggaactcggcataggataactttagtggcttttccttttctctttctattcccttaataaacatactcagtcaccatagcaaagtatgaactgtaggcctagtcttcccaaaacagaatgttcctaatcgctgttatttaatgccctccagaaacactcttcttaattagtcagctgagttgagaacagggttgaggaaggagtggagcaggcagtggggagctgcctctgagaccagccatgtcgttctccccaggttagtatagtggccccttatagatcgagtttgggagttatagatatagtttccttgtgcctacagttctgtggtcaaacaatatattcaacgtgactgtattaggggctggagagataactcagcagttacgagcactcactgctcttgcagaactgcctttggttcttagcacccatgtcaggcaactcagtcacaaccacctgtgatcccagctccagggtgctgggtggatgtggcttcctcaggcacctttgttcatgcacacgtgcacccatgcacacctttaaaacaaatcttcacagaacgtgattgctttacttacttcctccattgccatgaccatattcctgagaagaagcaatttaaaggaagagggtttgtttgaatttcagtagggaaggcatggcggcgggaatgtgagacaactgttcacaccgtgtctacagtcaggaagaagagagtagatggaaagtgggacctgactcactttttccagcaatgctctaccttctaaaggtttcacaatgccccagaaggaatgttcaaacgcatgtgcctgtagggcattcatgttgcacggcattagcaaaggcatggtgttggaacaggaagccttcgttagagtgagtcctccaacactctgctgtgtgattctgacaggcgggcttaacctttccaggcctcggctttcttcctgataactctgtggtgaagacactaactctatagcaatgtttctggttccttgatgagcagagatggctcttaatgggaaacctgttttgcagaaaagggctggaagatgtccttggtcccagatggtctagagttggtccctgggtgcatgaaggaccccgagtctcctgctgacatcacagctaagcctctttgtttctgtctacacagatatgctctaggaagatgttctggttagtttatttccatttgacacaagctaaggtcatctgggaagagggaacattgagaaaattttcccatcagattggcttctaggtaagcctattgggggcattttcatgattaataattgatggagaaaggcctaacccactgtgggcaggtggtcctgggttgtgtaatgagagatttgggaaacccagggggataaagtcagtgagcagcatcccatcatagcctctgcttcagttcctgccacatgttcttgccttgagttcctgccctgacttcctttgtgatgaactgtgtgttgtgagatgagacaacctccctcctcttcccaagtggttactgttttatagtggcaacagaaagcagctgggagggaagagggcaccgggagcacggctgagcctcatgctaactcagcctctgtcgatctgctctccagtcctagctatgtgtttgctttcagagtcagaagttagaagcccacagttcttcctcgtcctcctcatcccccccatcctgctgtctccttttcctcatggctcccttcttccttttgttctttttctcctcctcttcctcttccttcatctcctcctcttctttctcctcccccatcctcccccatcctcatcccgtccctctccttttccttcatggtgttggggattaaacccttggcttggtacattttaggcaaatgatctatcttaaactatactcaccctccaatgtctaaaatatcacccaaaattcgactgccaaggacacacataaatagtatagacacaaaataaaaatccatgttatttaaaaataacatgaaagtggagtttattatggtttatttacagaaacaccaaaaataactgactgtcaaataagatgggaccacttcaataacagaacactgggcagtcactgatatattactaaagaagaatatttaatatcatgagaaatgttaaccatatgtgtgactaagaaaagtagattttaaactgaagtactgaagtatcaaaacaccaactgacttacatactcaagtaataacttatagatgctttgttccttcttcttcttcttcttttttttttttttggtttttcgagacagggtttctctgtgtgtagctttggagcctatcctggcactcgctctggagaccaggctggccttgaactcacagagatctgcctgcctctgcctcaagagtgctgggattaaaggtgtgctccaccaatgcccggtgtgttccttcttttttaaattgtggcataaatacttatcatgaaagttcccacattagctatttgtgatggacagttcagaagttggtaagtacacttgcactgttgagcacgacatcttcagaatgctttcatcttgcaaaatggaaacccttacaccatattaaaagtacttttcaggcaggcctggtgacataggcctgtactcccagctacttaggcaggagggttagaagttcaagagtttcctgggtgctccaaacatgttcaaggtaagcttggacaaacgagtgaggccctgtctcaaagaaggatatgacaagagggctgggcatgtaactccatagaagagcacttgcttagcctacttgaagctgtaggtttactcctagtaacacacacacacacacacacacacacacacacacacacacacacacacacttcctagctggatgaaggaatggtggggcacacaaaaactgggggtctgagtcaggaaggtcacaagttctaggtcagctagggctacacagtgagatcttgccccttgaactttgcaaaataaaaagtattttctattccccttcctccagcccttggcagctgcccttctactgcctgttctaggaatttgactactacaaccaccccagaatggtggtttgaaagaaaatggtccccaaaaggagtagccctactaagaggcttgttggagtaggtgtggccttggtggaagtgtgtcactgtgggtgtaggctttggtgtctcttttgctcaagctttgctcagtgtggcagacacgccatttcctgttgcccgcaagatggaagactctgagctgcttctccggcaccatgtctgcccacatgcttccatttctcgaaacgatgacaatgaactggacttctgaagggcacgggaaccgcctcaattaaatagtttcctttgtaagagttgccatggccatggtgtctcttcacagcaatgggaaccctgacttagacacccaggtaaggggacccatgcagcagtgggtttttcacaattgttagaaacagcagcacatgctcaagcttcatccttggagttggtatcagaattgccttttaaaggctcaataatattgcactgtatgttctgatgggcagtcttgactgccagcttcataggatctagaattatatgttgagagagaattgctttgaatgtattggttgttttaatcttgtctatagaacagattattttactgatgggggataggcagaggcttttgggtttatttttctttttttctttttggttgggaccaccagccagctcccaaataactacacagagacttaatattaattataaatgctcagctgatagcttaggtttgctaccaactagctcttaaaacttaaattacccccccccctttttttttgagacggggtttctgtgtgcagctttggagcctattctggcacttactttgtagaccaggctggcctcgaactcacagagatcctgcctctgcctcccgagtgctgggattacaggcgtgcgccaccaatgcccggcaaattaacccatttttttttttaaatctaagttctatcatgtggctcctgacctgttacctgattttccccacatgtgatgcttcttctgtgtctggcctgcaactcctgagatctacccttcttcttcccagcatcctcctagtctgctctcctgcctaatctcttcctgcccagctataggccagtcagctctttattagccagtgggagtaatgcatatttacagtgtacaaagattgttccaaagcaggggtgctcaataaataacactcaatcagatatgtacagaaacactgagagaagactcggcccatgttttcccaaactatctcatgcagaagtcaattagaagacattttgcttggtttttgaagataggctctcactgtgtagctttggctgctctggaactcactatgtagaccaggctggcctcaaactcatagaaaaccacctgcctctccctcccaagtgctgggattaaaagtgtgcaccactatgtctggcaactagagagctttttaacttacaaaagtatgtacacacacagacatagactgatacacacacacacacacacacacacacacacacacacacacacacacagatttaatgatggtcttaatggagaaagtacctctggattcttctacgcttaggttcttgattgtaagtcatctgcaatgtgcatttactcaattttaaatttggataccccaaactgcttttaaaagtagcagttggggagcactgacacaatgttggattatacagagactttggggaggctgatttgttatgcacaagttttcttcacattgtttcatcagcagcaagtaaagtcttagtaccaacccactacatacccaaagccattccacaaataccttcaggattttccccaatcctacagattgaatctaggccttacacacactaggtaagtctgtcctctgccttggatctgcatcttcagcctaattgcagacaatttaaagaggaagttatgacctataaaagtctacgtggtttccctctgttccctgaaaggaagtgaatgtccttcaaataggaaattaggagacagacactgtgatttttttttctttccatcttttggtcagcactggggattaaatctgataggcaggtgttttcttatggagttccatcttcagtatcttttgatgtcttttaataacaacattttctttttttttttgtttttgtttttgtatatgcccaagagaggaattgctggatctttttttttttttgagttttttttttatttgaattacaaacaagattgttttacatgacaatcccagttcctttctccctcccttcccccccaccctcccaattaaaaccctacctatcacatatcctttcttctaatctatacctgactcaacctttctgctccctcatgacctcttgatagcaacattttcaatatgagcatctgtcaaaggacattactcctgtggaacctgttgaggattctgttgagtagacacattgctgagacttgggggaggggacacacaagctcaggtgtatttcctgtcatactgaaataacaagacatatgcagggaattatttttactatgggaaggacggtttttacaactggatttcttaggattattactatttttttccagagggagggcacgacggcaatgttggctccttttgtacccattctccccctctttagggcaccattggtatctttgtttcacctttgagaaaacgcaggcttagagtaattaagggactcagtgaaggtcacccagatgagatgtgccagagacagggaacccaagactgcaaaaagctagaacttgtgtttttaaccaggacatttttctgtttcagatgtcttggtcccagtgagaagatgtgtgtatgtccaagcagatggcggcatgaaaagagggcattgtccttgagggagctgctttgggctcttctgagctttaggaggcacttgcccaggggttgtgcttttgcggtcaccccttgcatgtgttgccacagatctaggggttcacagaaggaatgaagcatgtctttaagccggcagatgaccagcaaggcaggctcagggtgagaaagcagaggccagggaaggccaggggagggcctaatgctttatggcttactaatgaattccattttatagctcaactcccttaagttgtctctttctgtgattgattcccgtcccccagttccctttaagcagacgcttgttgatagggagtgtgcggtgttgactgagtaaaacatactaatgcatgctctcctcagctgcagataacccagctttaaacatgatgaatgcatcttttacaagaaaagataccatcaggaaggggactggggtgtgcaaatcagatcccaggtaaacgcccatggcctaggacttcaacctctctcttctccccccccctttcccccttccccttcttggtctttttgaacagttgaaccagcctgtcggtgttcttaccaaaaagtgaccccacccagcattgtaaacagctagagtgactgctgccgcattctggttttcatcaccccacccccaccaaactattccacacctacttcttccccagtgaacaacaagacaagaagaagccagattcccataaaactgcacagccctggtcattaaattacactggattagaagtgacttccttggcggactcaagaactttagttctccttatgtatgcttgcacatagactcacacagacttggaaggagaacagagatgtttttcgggtgaggattatacacttagtaatatgactcaagttgcctccatcccagacttctccatttgggtctaggccaccacaatacacagactaaaaacaccagccactctgagtgttatttatagggacatgcctgtgtagccctgagaaagctctagatcaggaggggtgtgtgtgctggcatctgggttcccaccccatctatgtgcccgtttgaaagcagaaacagagagagaagagctggcattgtcagtctagtttcttccagctttttaaaaagaccttggctacgctggcaggaaaagagcgtaacgaggggggaaaataaaacaaccgctttctcccagaactgataaccaaataaaatactgttatattttctgtctaataagcacaaggagttccataactcccttgattaagcatattatccttcttcaggaagtcagtttgatttatgcaaaaagtgatttggacatactttctccggccgtggagatttcataattcctggtgtacgtctggaaaatctcccctcatcgtgagtccaaaccaaattaatgtcttccagaatgacccaaggaattaatgaggttcctgctgtcagttctgcccatccagggtcaagtaaatcatttgctggctctcaggcccctgttgcttcgctgcctctctgactccacattcaatgataagggctttgcacaagcctttgaaatacagcatcaccgacactctctgttcatctgctgggacatattttaggttctgcttctcagtctgctgtaaactcagcctttaatggagccagtaattgctgataaatggggtatcaatgaagccagcacaccagaaatttccccattcttttctgctgatgcatgctgtttagatctccgctgacattacctcaaattattgtgtgcccagctccttcattcccaaacgtgtgtgtttgggtgaagtcttgactcatttttttctttcttattcaccccattccccttccttccttccttccttccttccttccttccttcctccctccctccctccctccctccctccctccttttctctctttcctcctccttgaaaaactgaagctgggtgctaagagactagggcatcttttgttcttcctaccagaagccgtaattttgtgtccacagacctaactggaatcttctatgcttttatttatttgttatgtccatagtgtgtttatatacatgttcctttatatatacacatatatgcatgtatatataaacacacacacacacacacacacacacacacacacacacacacactacacatgtgtacgtgtgagcacatgggttcttgtacatgtggaagccagaagtcaacattggatatcttaatcattttccacataattgttattgttattcttttgcttaaattagaaataaaagaagaggaggtgcaagatgagacccaagactgagagacatattagactattagacatgttaaccagtttattataggcctggtagagtaaagagactaagagagaagaggaacaaaattaatggctgaccgccatggctggttgccatggagaggcagagagtgtggaggtgggagcagagcagagcagagcagagagcagagagaagagtagagagggtgtaagtgggcggggtctgtcttttgaaggggtcctttgcacctgcgtgcagacttagttcccatggaaccctgggctgaccggggttctgcctgagtggattctgccaggtaacaggggcgggtcagcataatgcctgaacctttcagttattattattaatattattgttttttaggcagagtctctcaatgaacccacagcgcatcactttggcaagagtagctgaccaacaagccctgggcatcctcctgttctggtcaggtgcctgctgattgtacccagatttttacacaggtgctgaggacccaaacttagagggtgggaagcattttgccagctaagccatctccccatgtgcttctctgttcttccccaactatcaccctgactggctcccttggccacctccaccatgtgataactgggaggtttcaaacatcgtgaaggtgactcacctgcagctcctgggataacactagaccctcagtgcttgccgcacacgtccatcatcccaggcctttctttcttcaggagtttagtttataatggggatggaggcaccagccatctcctccttctgtagtctaacttctcccctctttgcctttgtgcttcatgtgagtatgtgggtggtcgtagctgccgatgacacagaccatacctcactcagatgacgctgtatgtccagaggaccttgggcctgctgctctcccactcccttccaaaccagaaacaactatagaaagtgcttcaaccagcactgagtttctgcaaccaaccagccagagggacagtaaacatattcataacatattcagatgccccctattgtctttgtgtagaccagatgcttgaaggaaggggcctcctggatcttcttgtggttattggggttcaaatcttgagccccgaagtcattggaaagaaagggaagatcctttaagtgggaagaaggaaaccatataccgcaagtgaatgctttacatttcaagaggtgaggtcccaggtttttatcaacgggacctgtctgtcagttgcctgagaagggctcctctgttgtgtgacagtcactcctactacaaggaagccatgtggctacattgttataatttgaagggaaaacccacattcatgaatgtgagcccaggagggtcactttctgctgtgcggctcagctttgcttcagtggttatggatgagctagtgaacggcccgatgaatgagccgatatatcgggatctagtgagaagcatgcttttggattgtgagtggcatctctggaaggtcccaatggtgggaagagtgcctttgccagcttagctctctctgggaaggtggtgatgttctgactgggatgatactctatgaggagagtggatgccatgtatgttccatgcaggggtcagaggtaaaggtcagccaaggtagacagtctgtgtagctgcttcactaagtgttgtagcctccacatggaaggcaagaggaccctttccatcaaaacgtgatgctagtgcaggctctctcactttctctcttctctcctctttccattttctgtagtgcactgaattgaatacttccaaattcatgtgtcaaggctttaaactccagtgcaactgtatgtggagagctgggttttgaaacataattaagataaaattacttcataaaataaaataattataaataaataataaaaataatggtgtaggattagtagcttaagataagaaatctccgttggctgggaggtggtggcgcacacctttaattccagcactcgggaggcagaggcaggtggatctctgtgacttcaaggccagcctggtctacacagtgagttccaggacatccagttctacacagtgacaccctgtctcttcaatgtgatttgggggctcattttgtcttcacgggtggtctccttagaaaggactctctcacttgttaagcgtgctatacagtgtgctttaggttcccagattttgagatgtcatccatgcgggagtgggctttagtgatgcagttgtctttggattatttctcctcctgtaagtaacacctcacctgtatttctgtaagtaaccccaatagaactcactggctcaccaagttgtacttttgtttgtcatggtctccctgtctgaggtgagtagacaggtgtgttgtatcttccatagaaaattcttctcaggcaacagtcagtgttagtaggtagttcccaggagtgatccttgataggtgtagctgcagtcagatgggtggcgagcaaggttgtgattatccagtttgggtcctggtacagacactggttgggtcttgccctagtaggggtgaccaaatcacaatgtaatgggactctattttctttgtatctgaccaaaattctagtcctcagtgaaatggcaaatagtgaaatgataaatgcaaaggaggcttgcaatctctggacagaatgctgggaaatgctctgttgtgacagtacttatgtgtatccatttcccacacactgtgcaatctgttgctacaccaacccactgatttggcagtcagggaccagatattcctgtgagggaaagaattggttacccagaggcctcagtgcagggaaacttaaagcagttaaaatcataatgattcatggattggtgtttgaagtacccgtccccagccctgtgctcattcagcaccttcctctctttgtctccaataatgacatcatttccttactggttgtcagtcctacatgattctcatgtgactgggcaaataaaaaattgtctacctcatcatagaatccaaccatacccaatctcttccagaaaagtttcaaaataagacaactggatggaaaaaaaaaagagcagtatcagttgccacatttttttttttatggctttgaatgtggctgtcaccactccatgtcctgttgcatatttccctcgtttttcctaatcatcactgtgttcttactccatttattgaatcattttgaggaacaaatggccttattaggaaacagaattgggtcatccagaagaggccagggtgggggatgatctttgtatagtggctgtgaaggagaaggtttgagagactaggtccagtagacaggccaagtgataaatggacaggtaccagacaacaaggggacatgccagctggctgtgggggttcgtcaagagtgtctactgatgctccctgtatcttaagatctgttttgtgttttacttagtataactcaaacgctgacaatgaactggtgccaatgagatgagcacctataatctaagacccgatactcagtttcataatttcacaggtgaagaaactaaaggtctgggaggtgaaggtcttagatctcatggttagtatgtggcagggctgtaatttatatatacgactgactctaaagtctgcactcttcttcacctatcactcactcaactctcaacatacaggaggctcagagtggttaaaggcacttgttgatcttgcagaggacccaggttcaattcccagcacccacatggtgattcccaactgattcttactccagtttctgggggcatgcgatgccctcttctggcatccaatggcactgcatgcacatggtgcacatacatgtaaccaaacactcacacatgtcaaatgaaaattaaacaacaaaaaaaccccaaactcagcatacctagagagactggcaagagagaagaaatagtcaagcagaaagcaaaccagtttcactgacaacgtccctccctctctggagacctgtcaggctttgagactgttgaagcttaggccactacgtagtgtgacaatcacagatctggttggttggacacccaaacactaaggaacgtatggcatggtaaagaagggagaggactagtgtgattttcaggtatgtaaggataacgatttagtgaaatagaggaaagagaagagaaataagggaggaagagaagaacagaccaggcatgcaaagtcatgaggctaatgagcaggaggagggaaacaggtcagttaaatcagcctgtacttttctcccccaataaaatcctagggccatggaacttcaagcttcttgcttgaaatgggttatctatggaattctgcctgaaaggggtacagtggtgttgttgggcgggtgtttaaccaaaaagaggaagtgactcttgatctgttgatgggaagttcatattagttgtttctatttgtgtgctcattacctaaatggtgtttcaactgtgactttcattgttttcaagagctgccagtgtctcaggtcactgaaacctctcctggggtctctgactcactatgtcccttaacatgtgacatcgaaatgggaaagggaatagtggaggtggaaggggacaggctgggagagggaggagggtgacaggagagagaaatgtagggattccaagacaaagtatatatgaagatgtgttactttgtatactaattaaaaaaaagaaatagaaccacaaatgacataagtcatctacaagcggcatttatgtagcaaggatataaccattggatatttaaaaaggatttatttgtatatgtgtctgtgtgtgaaccacatgtattcagggactgggggaggggagaacagggtattggattctctggagctgggcttacaagcagttgtgagccacctctcctgctttgttgatgcccatgggagggggaggaggagtgggtgatggggtggtgaaggggggggcgggaggagatgagggaggggaaaccgtgattgggatgtaaaataaatgaaagtttttaattaataaaaaataaattaaaaaatgtaccaaaaagaagaaaagctcctgacaaaagccatttaaggaaggaggagcttattttgtctcacagttccaggaacagtagtccttcatggaggagaattcatgagaacagaaacttgaaacagcgggtcacattgtgtctgcactcaggaagagggaggcgaatgcctgttatcagctggctacattgtgtccacaatcaggaacagggaggtggatgcctgttatcagctggttacattgtgtccacactcaggaagctcaggtagcctttttccttttaggcaggccagggcaaagccatagcatggtgccacccatctttcagactgctcttcccacatcagttcacctaaacaacatatgccctcccaggaatgccagaggctagcctaatctagataattcccctcaggcttgtctacaggctcctctcctaggtaattgtaagtcctgtcaggctgacaatcaacataaacctttacaatgtgtatgtaccctagtcagtgtcagcagacacacaagtctgtattatttttatactaatctataaacatagtaatgtaaacagtggtccatgccgctatctcagattctaattttagcagaggggcctggtctcagcattcttcatgattatctgtagcttctctctttgatagtaagaagcctgatctcattatttatgttcatttttcctctgatttttttttcagttctactgtacacgtaaattaggttctgaatagctgtacacttgtaagaaacaactaaactactccagctcatcagcttgccttagagatgccatctctacctcctgagtttgtttgtgctgttcatccctccaagcaactgttatgaagaccaaaccaaaccagagatgctcacacaatattagctttgttcctgtttttctgtttaattctgtgctcagattcttgggtcatatctgagagagtagataacatggaagaaatagagagggatagaaacttctggagcatgtgggaactgagagcatcccaaatggaaaagagcttatgtctacggcatcctgtatttgtgaccctggtggcctctgcctttctcctgtgggagggtttctggtcctctctggtcatatgatggacagtggactgggatcagatggtaggcagatggtaggtaacttttccactacaagagcatgtctgctcacacaagagcaaagtatgcatacctttaattataactcatttattgggttggtcaacttttttcgttagaattaaaaaaatcatggaatgttatttctggaagggactttggagtttcatgacaatatgtttttaattcttcatttagaacatggaatagtcacatgatttccctgaggagtgtgtatgtttcctacaaaataactggagacatttaccacttgttttagttttattgttgtgaagagacactatgaccatggtaattcttataaagaaaacatttagttggggcggctcccttacagtttcagaagttcagtccattatcatcatggctgggagcatggcagcgtgcaggcagacatggtgctggagctgagagtcctacatcttacaggcaacaggaagttgactggctgtcacactgagggaagcttgagcaaaagagacctcaaagcctgctcccacagtggctcacttcttccaatgaggctacacctcctaatagtgccactccctttggaggccattttctttcaaactacttaccacttgatctcctccccccaaccccttgtgcttcccagtgcccaacactgactcctccaggtcctctatctgggatgcctgtctttcatgccaccccatctcccttgaacttgttctcctgtccttccctgccaggtctgatgctatattaaaggtgaatttccatgcacgcctcatctctcagtgtgccattgcctagcagacactgctgtacaccccatcccagggaccaagtccatggtttgcaagaatatttgctgctttgagtttgacttcactcctttacttttgaggcaaggcattacctcttcttaagaaattccttttcctaaagatcgattattcaatgttgagcacacttgggagttgacattctgggctaagttatttctgaaaattacttttagcacaagaactcatcattcctctcaaattaaactgggtgagggcctaagtgaataagcttagggataattattttggagtcttcaagaatgcatttaacagttttgttcccagtaatctgactgacaaagcaaaaggaggcctctgtgcacatcgttgggagtttccctattggcgggcaggcacaatttggtttgcaaaacatctgatccctggaaacaaatgtagacagcataatgtgcaagccactgctccgttgtgaacagtggtcctacaaccagacagacacgtttgctcattcactgcgtccagaattccaaaatttatagagctcttccttttgcaaaaactcctaaactaggtttatttccatggacttgacctttggtgtttagactttctgcccctggcaaacccagcgttcatttgttcctacgcatggccattttggcagtctccctaacagtaacagcctgaggaaagaaccaggagtctacatatggagacctcatccccggttgcctaatggattcaaaagacatcctgaatattcatcatttctccttttatgagcaccttggcaattctctccaaaggcaaaggctgcagtaaattcagaagtgccatttagtgaataccaatttatcctcaattcggtctaggtttttcctgttcctcggcataatatcggagttcctgagagtcctgtgaatgcagggtattgtctcagcttgggggaggcgtgactgcttgtgaaaatccccagcctgcaccctcaagctctgtgctgtggcctgtgcaggccagagttcccttcctagaagttggaaactaccttgtgtgtgggggggatgggaaaatcaaatggaagcatttagcttagggacacagctttcaattaacagttgtaaattagtaaacagttagtaaacagtgattttttttttttttttttttttttttttttttttttttttttttttttacctctgtgagcatgcatgtcctttggtatactagatacaacactccccaaatgtatatcacccgggagactgtctggacagtttctcagtggagacagagtgggaaactcaggtccattgctgtttttattcacttgaagagtgcaggctgattgcctctctctctctctctctctctctctctctctctctctctctctctctctgtgtgtgtgtgtgtgtgtgtgtgtgtgtgtgtgtgtgcacatgctgggtccattcagtgtcctccaggctagtgactggaaattgagtcttttctctcactccatctcaggatcagctaatgacagtatctgtatagcattcattaatttcctgtattctctgagcctctcttctctactgggaaaagtggtgcctaaaatctccatcttctcagtgtctgcgccttctcacactggaacagaactgcatgggtttgttattgatctgctcggcctggcaggttatgaaattggatttccagttgtatttcctaacttgctataaagagactatatcttggaaaaagtcaaacaatggtcaaaccggtaggtttgaaccaatccaggctggatgtttgcctgagaccatttctctggtgaccgactgaccttccctgcaggttgttaagattccatctgaggatggaaggccatgccatttccctttccttctttatgtaccccaactgtcttagtgaatttaaatagctcctgaggccatcacagagttcaagaaaccatggctctgaggccacatctggcccatggacatattttctttggcttccacagtgttttggagtgtttttaattagtcatcaacatttatgaattgggaaatttcaaattagagtatccagactggggagccccatgaaaaatccaaagacctagaaagcttggacctgtttttcaaacggttgcctggggatgaagagataggtatgttgtaggactcatgcccacactcactagtcaggcagtgtatccagcaccattagttttttacctggcccgttcactgactcactgacctgcctggcctctgtgggctgtgggtttgtgaggtctggcttaatcaacgacagaaagtccatagagaaagatcatgtttcccgattagtttccaacctcctccaattcatatgagaaggaaaggaaaggagccaatgaatacgagaaaggtttgtgactttcaccaaggtgggagccttttggattttcagtgtgggagggaggagcagacgtcttactctgttgattttgatgatgacgatgatgatgatggtggagtgtgtgtgtgtgtgtgtgtgtgtgtgtgtgtgtgtgtgtgtgtttgcatagacttaattcttagatttggcctaagatattgggcccccacaattttctaggagaaatagaagctgactggagaaatcaggaggccctgagcacagtaatgggggaatgcaagtgagatgctagacctcaaggaacatcagactgtgtggccttatgtggagctgggtatgaatagattctgaaccctacagactgtcattaggagcaagctgagagctgagggtggccagttttctcagcagatagatcaaaacattaaagtccttctaaactcatggtgctttccagaattaaaaggctaatagtctcactcctcatttgattaagaagcaagagtaattatacagcctttgccttctggtgaagtccttcaagatatgagctggcagctggacagtggtggcacacacctttgtgtgtgtctctgtgagttcaaggccagcctggtctccagagcaagttcctggatagtgggggctacaaaaaccaaaagagttgatctggtccagtgatatgccattactttgagaatggcatatgcgatggagaagtaggtgggtgcttttgggcagccctactcagaagtttaacttagtcttccattattcctttgtcaaagagcttaatggcggcagagagcaaattggatcctcttaaaattcgcctgcaggggaatgcagagccgatgactgctgctgctgctgcaaatccagcatctgcagtgagggcatatatacatctagtaatgtctggactccatggatgccttggtgggttgggagaaagaccttcatctctctaggtgatacttgatagagaaatccccatagcctctgtctctcagtttcctcccatgtatcatggaattacacaggtgaccaggccatgctttgaacacttgagtgcatgctgaccactgggccacattctgtccagtgaactcagactttggacttgctcattccaatttttagaagtggttcttggcttctgcttcccattctcttttggcatcatggtctgctgcctcttggcttttgattataagtgccctacttgtaatccattcaggcttggggagatcagagaaatcggaagtattttatgttgcaggctgtaggccctacaaggtgagggcagtatcctgtaggggtatcaggatatccgccctgtttttcccattgaaatcggtggcatatctggagcagagagcttaatgggggcagagagtaaatgaaactgccttggagataaagctggaatgtggtgatggtggtggcgtcaacacagctcaaggaggtgagagccaaagagcagatggaacagggagaaagaggtttctatacatatccatgtaaaggggaaagccaaaggtaccatggaattaaaaagaattctaacatatgtgattattttgactaaccttaatatcatgccagcaaggtctttgttgaataggagtgaggaatgactattttggagcaagttaatctgtttgggctaggtactagtcactgagctatggtctaggtttgtattatagtttatatttttaggaatagccttcttttaaacttaattttatttgtttcttttttgaagagatgttcttagttcattcaataaatttcattaatgtatttggttccttttttctgttttgggggttattttgagtgctcagagtcagctggatcacatggtagtctccctaaatctcccatcttactgtcattgggcttttaccatgcccttggctcatacactagccttcttgtctaaatctgtggtcccgacaactgcaccccaacaattcatatatgtactatagcttgtctgaaaactacacactctcatgatcactaaacactcattgttcttggctcagactacaaataaaactgtttcaaagtttctgtgaatgggtcttaaactctttagggaggatggtataatacttagcacatctcaataaatatttatctgtcaaggtgatcattcagacaggaataaatctgcttcctcttaggaagtaagctaggccatcgagacggcagaccttcagaagttaatgcttagtcatgagatcatattgtgtcttcatgtgggattggcaataattaagccttacatgtcaagaattagcatagcatgaagaccccagagacatttctggacatgtgtggacagatggattgactgtcacccccaacctcagatctagaaaagctgagtaggtttatatgtggtgttcacaatcaccagtaggaattgcatcacaggatctctgggttgtggccctctttgttgacttgacagtcttggggtggagaagagtctgtgggtttttacttcaagccttttctcattggagactcatagggacaagattatctaatcattcttgtgtattttggaaagagtgaagttcagattaaagcacatttcacagaaaacatgttctggaccagtgttttgagatatgctgggtgaaactgtgtgactcagatgttccttttacacgtatttacatttatttgtttgtgtgtgatttgggaaagtcagttctctctgtctaccatgttgattctggggatcaaaatcaggttgtcagtggcaggcgcctttacctgctgagctatcttgtctggccttcgctagagttttttagggtgacacccttgatgtgctaatacacattgtaactctttcaggagaggttggaacatgcaacatttcccaaagctcttgccacacaatgcttatgaaaaaggcttcttgaagtagttggaatggggtaggggtagtgtcttacaaaatccaagttggaaaacatcacattgggaccatgctcctgtggcatggagcagaaaattctcagtggtaagggcctaaggatgtgaggatagcttagagatatgggggccagaattcatctttctgatgtaccaggccaatgttccttctgccacccctgacattcatttcttttcctctccttcatctttatgtgcgtgagtgtgtatgcacaggaggtgttttagtcacatatgtgtttgcaggtggcatgcagaggccaaaggaggacgtcgggggtctgctctgtcaccctctaccttatatccccttcagacagtttctctcactgaacctggggctagaccagcagctagctccagcaaacatcctctttccatcccctaaaagtgctgagattacagaaaggcacagtcatgcccagatatgttttaaaaacgtggatgttggatatttggtgttttagattactcatctttacattcatttcttcaagaagaagacaccccaccaaaaactattctgagagtggcatccaaagccaaggtctttctcccttgttggggttcttctgttctctacatttttattttcattctaagataatcattcatccattcatgcatgcatgcatacatcaaactaaataaacacagcaccaaatgccatcaaagacattagagcaaagtacaatgcttgcacttacttaataccactgtcatttcagtgtgtttttaagctactgcaatatggatgttggatatttgaactcaggctctcttgcctttacatcaaggcatccttcccctctgaagccatctctccagccctcgctcctccccgttctaagttgcttttcccacctcaagagatgagagttactgggagctcttctggctttccacggtgtgcaggttctttgggaatagtaaagtttggtcctccaaattccctgtgttctgattggagctctctttccaatgctgataagtagtgcttaaaactaatttcagacaatgcctgtattggaagaggctttggcgtcttcccactgctgtatctttatgagcaagggctcctggggactctgagcctcgtgctgttcctgctattccacccagctccacagtcagtcttcactaatttgaactccatgttatgtatttggtttgtgcttttgagtaatctgtattagtgtttattctgaattctatttttctattaatattttcagtttgctataagtagggccttcctctctcctagtcccagtgggatttctgcgctaatcccagtgggttctgctttagtgttttgaattcttctggatttcatatcaggttattaacttatattcatggtagtaaattctaacttatgaacaggtaataagaataaaaacagaaagttgttattaaaaactttgtgaatcaagtaagtttttgatcacttattttacccagtgtttgagtaattaaagatgttataagaaactgactgagacatgaaactacttattagacaacatgctgtactatttcatctcattttggttatacatctagctcaataaattgttggtgacatgccataaaagaaaaatatcttgaatgaacttttattcatttacatttgccaggctcccatgtctcccctctctagttacaaagattccatctttttccattctaagttttaataaggtcaggataaaaaagttatcctacagatagggctggggagatggctcggagagtaaagtattttctgtataagtgagaagcatgatggtgcacacctgtaaccccagaggttgggaggcagagacagatggactccacaggctcgtcagcctactagcccaacctcaacaacacattccagcatcggcaagagaccctgcctcaaaaaatactgtgttgagtggtagaggaagacacctgatatcaaattctgtctttaacatgtgtatgtacaagcaaccacatctcctcgcatacatgtacacacacacacacacacacacacacacacacacacacacacacactacactacaatatatccctataaagactatcatataaatagaactttagattattaccatcaaatcagtaatgtaaaaaataaaacttgagtcgaccttcaggctggggtggaatttgctggagacacatttttctgatgaaagaaaacaatcctgtctttatcaggtgttgcctttacacctctaagcaagaatgaaaatgaggccttcactccatacaagtggagaaagaaatgaaaacgatggagatggatttccacctagcctggcttttcatataatcctttacttccctttggaggaaggttttgttcattggccggtcccaaccagagacatatttaattgctaattctttgtcttagcatttttccatgttatatttatgagtgtgaaagcttgtttaaagcattacagctagaaaaaaaagtgcagtcgaatgtatggaagctctcaaggaactaatagcctatcaaaaaccagcgaagatttatttaatgtctcccttccaggaggatgtattgttggttcagctgcaactccttaacttcatcatattttatatactttggccatcacagagtgccacaagggctgttgcatgggtgtgatttaaaacgtgttctgattaagtatacaggagcgctcctgttctccaacacaggaaggagagggacatcataaatacacattgttcaagtgtaaattctacttcacactcacaagctatattgcacttgtatgttttatgctctgttggtacttaaaaaatcatttaatttagtgggcatttctagaatctaaccaagaaccaggcagcaaggacctacttagaattctttccataggatttggagtgggcagtgtgagatggggagagaaaataagtgtctgggacaaagcattcctgctgggttatacacaacttgtacagcctcagtccactgacttggatgagcaagaatgcccatctttaaaatttctttatgtctcccagtctacccagtgggtagaaattcttcccttgctggattgcttcttttctcaaagaatctgggagtttccatgaagctaagaaaagtgcaagagccttttataaaactctaggctcaaactgacatccttgagatcacatcattttgacacctgttgctttctgaaggtttgcaagcatgggactggggctttctgtgatcttgggatccttcgagttcaagggtcttatccttaggattcccattcatccaaccccttagagaagtgtggccatgcttccgagtatcgcttcagagtgcagatgagcccacatgactctcacaccccacagacctctttccttccttgccaggcctgagaggctgactttgctcatacttacctgtaatgaatactatatgtgaccaggtaataagatttgaaatagaataactacttcagtggttctcaaccttcctaatgctgcaaccctttaatatagctcatgttgtagtgacctgcaaccataaaattattttgttgctacttcataactataattttgctactgttataaattgtaatgtaaatatcttatatacaggatatctgatatgtgatccccaaagaggttgcaacctacaggttgagaacaactgggttagtggactggcatagcaggtggaacctgagtttgatctctaggactttcatggtgaagggaggaaactgaccctcatgggttgtcttttgatcttcacgcatatgcctcagtgtacacacatacacacaccactaaataagcaaaaatagcacaaaaattagttattttgtgaataacaaaaaacaggtggatcacttatttttaccacatgttgatctaattaaaaacattatggcatgctgaccgagacataaaacaaccaattagacaatatggtttagtgatttcattttattttggttgtctgcttagcagatggctcaaaggctttccgtaccttgaactcccctgggcatacagaatacttctgttgttagtcccttctgcttttagttctgatgtctgtcctgccaaattgctgagtgaggagctctgaggtgctgtgcccacctgcttgtagttggcagagggaggtggtagaggtaagagcaaagataacgggacaatgagctcccattcatggttcaggaaatcatccttcttcataggctttgtaatgggtgcagaaggatgccaaggccatgaaaaacaaacaaacaaacaaacaaacaacaaacaaacaaacagcaacaaaattggcctaaattggaaaactgatggaagtcttccttcactctgtggactagagaatgcatgtcaccagcaggacagttgctgtgacacacaggcaatatgaaacatcttggctcaataagaaacagaaaacacacccattgcataaaaggcaatgtaatgaaggcaaggccatttgttttttgtgagccatggttgtttaatatgtgccgttgtctggttggttccatcactggagactctaaagttccactggcctcttggtgatactcatgcttcacccacagctccaagcctaaaacactggggggtgggtaaggatttggttgggattttcagctattgaaaagacagtacagttcataaaccttgttcatggaaactagggaatggtgtcagatctcctgggacaggagttacaggtggttgtgagccactggagttgagtggtgggaaccaaacttgggcttgtgggaatagctgcaaatgcttttaatcacagagtcatttctctagcctctgttattgtagttcttaggcaaaacaacaagtgattttactaaacacaaatagagcgccaccctttcatgttagcctttggtagcctgtaaacttaacccagggaaaaggttcagtgctcaggggttattcattttgcaattaaaactgtgggccaaccttctgtcttttatttagtgtcattgtgagacagagtttcacgtatcgcaggctggcctttaacctgatgtgtagccgaccataaccttgacctcctcatcttcctgcttctacctcccaggtactgggatcacggttgtgctctgccatgcccgttttatgcagcgctggagacaggacacggggctttgtgcctgctaggccagcactgtactaatgaagtcacagcctctgccaagtttgcagatcctaagtaaaagtcaaaagaagagaaaggattggctattccctgtgcatatcctgcccacacccctttcagttacatggtgataagattttttgttatggttggaatatgaaatgtcccctgtgaactcacgtgtttgaatgttgggtccctccctaggtggaggcactgttttgggaagtggcagaaacctgagatccagggtatatttggtgcaggtatggatgcggaggtaagctctgagagctggggttggcctggctttgagtctgacggctctgcttcctagaccactaaggtatcaactggcagctctgggtctgtggacctgcccttgctcactcgctcccacccaccgtccctagcagaggcgcctgtttctggtgctgcagctcctggtggcacagactgcacagcccaggaagctaggaagcaggtttgaggagccaggtttctcagtgtacttggtggtgagcattgccgggtggaggagaaggcacgaacaggcccaggagtaacggcgtccaaagagcaacaagccataaaggctctcgctgtggagagtgacgaaaaagaaaaaggaggagggaaggcctccagcaaagtgaagaagaatcccaccacttggaagagattgaaaacaagaagcctggagaaatgtcagaaggggacgaatcgggcaacttgtgcctaattttccgtgggccatgcctaatagacacgccgatcacaatgaagggaggggccatgcctaatagacacgccgatcacaatgaagggaggggccatgcctaatagacacgccgatcacaatgaagggaggcagatgatgggagatttgtagggcaggtgatggaaatcaagagaaggactagggagcaacagatacggcctgacaggagttcccgaacaacggaatggacagccatgactgttgcctcataccttgaaatccaaggttttctctgagctcataaagtggctattgttttacaagcttgtatttagtgtttttttttttttctgtaaacatttgctgttttcacttaacagcttctacataaacattgttttactgttgatttaattctaaacattcccagcagcatggcaatttaacccattttagaaagaaaatctctttcataatttgatattaataaagcaatttaaaaagcaaaaaaaagagatagcaacagggcactcttcaggcctgtaccgagctgatccaagccactatgcctgccctgttgttaggaactgtctcgctttaaactgtaagctcaagtaagtttttcttctactaagttactatttatcaggtatttggtcggagagggggagcatttaattctatgcagtgtccaattagaagcttcatggagtatctatgcatggcaagaaccaacctgaggtggggcacaaagtgaaggaagctagcgtgttccttcacagtgtcttatacggtgggggagttgggaagcagtggactatgacagacagcgtggtgggaagtctgcagtagagaagccataaggaacttcaggaacatgaaaagcatgcttcacctagagggagaaggctggctggctggtgtgaatgaaggacgagatggtccctggcttgtcttgagtgattccaagcatgacctgtgaatggctgggaggacgtccctgacagacggatccatgtgtaccatatgtgcaaagataccactagagaccacaggcttgggagagatagcatggagaatgtcagcttccagtgatgacggaagacaggggccggatgccagatggtgaaggatggcttgtctgatgacgggagctatctgcatcagccggtcatagttctgcatccctaacaggccaatggagcgtccgttctcgagctactgctgggtgctcatctggtttgattaaagatccattattgatgccagaaacaagagattaggctctgctctcttgtaagcatgggggaccctgaacctggaacacacatggggagatgtttgaggaccacacttggagaattagctgctggcagcaggccagctactgctgccgtgccttctgcaggggagaagggaaggcattaggaacacacttcagacacagatcttgctgggccacaaggctctgaggttggaagcaggagcgtggacatgctgcgaagcgattggctgccagtttaagggtacagatgtgaggaaggcacacaggcgggcgaggcagctgcaggcagagcccgttctgaaccattgcagacttcacagtcccctccccgccttgtccgtatcctgcttccctttccttaggtcgtgttacatccagcctttagagcgggtgaattatggctgctggctgtttccaagcataaggcattcttctttaattagaaggttcttaacacggagtgtagaccttctcacaggacatttggcaccatggtatgtataaatccctcagcaaactccccactctccattcctaggatgtaacacatactttgccaccacccagacactgtcctctggctataagtcctcccctctcccttctcttctccctgaacataccctgagaacacagacttctgtcatgtactttttttctttgacaccctcggtgacagttttatggtctagaagaaagtgaaaaacactgttgtcttcatcttactctagggtgctagcctgttgagaaaaatctatctcctgtcattctatgtattcatatatgtattgggaggtctctggtcacaattaaggatcttagctgatgcttcaagctgccattgagggggtaaatatgacaaaacaattttccctaactctccccaaaaaatagaaagaaaagaaaaggaagaaagaaaggaaggaaggaaggcaggaagataggaaggaagtcaagcttaagcttggagaaatggaggccatggtgaagccattatttcctgtaaatacccagataccctgtgtgaatcataagcatcagttgaaatggtttctgttcactttctctcatggatcctgttaccctactggaaagggtcttttcatttcaggtgcggttgtactgtggaagaactttccagagctgctcatgatctttgggctcatccttaactctttctcctcatccccactcaggggtacagtagaaggaagactataaactatctgttcaaggtagtattgaagttacaattgagataggtaaatagtaacaaggggtataaggacccagggtgggtgagcaagagaaacaaccagaacttgacactcggagcttctcgctcagaaggaagtcacttccacgttcttgttgtccgtctttcaccagttagctgctcttgtccaagctggcatggctgcctgcatcctggacctcagtcagtcatgctcagtatgggtgagtaaaggtgtttttgctaaaaaaagcttacaatctgccttcctactgtatcattgtccccttacacttcttatatgatgactttcattgggttgacatattgctgtttcatttattagaatatcgtcttgacatgcctatgattttccaactagtctgtcatttctttgccatcccaccatcttttgtctcccttctgctttccagggtgctctcttagtcccactctgctgaggcttttctcccacaccattccaaacctgcctttgttgacagcattcatgatgtccatatttcagcggccagacaggtctgcttgactctagaacttactctatctaactccctctttgtaggggaagctgtagccacgcctacttaggggctgttattctaatctcaatggcagttctctatcaagcacatgtgtatgtttgatatttttcttttgtctttgaacattagtgagcccaaggcccaggtgttgagtccctttccttcctcacctacaatccagctgcacacattcaatcttccggctttaagtactagggaattcttgggatgagcaaacatttgcaccccactgaatcctttgtctggagcctccagactcctatgttcgaacttcctacttccattgcctcacctatgccattcatccagttttagacttacacactcagagtttgccttgcgatttccaccttcagccctcccaaagtcctccctatctcacctgatgacatcttcatcaggttcaagccaaagtccttccatcttaagggatcataatctgtgccctccttgtgcttcacggcttccctttcagctctatccggcaccatcgggcccttcctgactctaagcatgccggacaggtactgccatttcccctgactctcatctctgtcctgaaatcaaccttgagttgtctattggattcacatcctcatcttccccgtatcttgctcaaatgtcaccgttgggtgatgcctacttgattacccactttcacattataacccacccaagggtgcccctaagcatcttaatttcattgtgttgatttccaacagcacaaatgccttcaactctaccatttaattggcataatcaccaggtttaaggaagtcatctgtccaatctgtgaaccatctctgggaaactaaacatttattttcctttttttttaaaaaataccattggtttaattttattttgcttagttttgtatattttatagtatccttcaagtacctacatcagctctgggaactgaacagtgagctctaaataatcagcagtcgaatgagtctgatgaaaaaagcacacaagtctagtaatgtacacagtgtgatcctgcgacccctctaatccttacaatagcacacgaggttggtgttattattagtgtttctttgagaggttaaaggagttgttaaagacaagcaagcagcagcaggtggctgacatactcctgtgaggaacaggcttcgtaagaatgaacacaagctgggcatagcatggtggtgggcacctgtaacagtaggactgtaggtttggggccagcctgggctacacactgagtctctgtcttaaactcactcaagaaaacaaacaaaacccccaacccacctgccccagctgtttggcagatgttctctaggcaactcttctataaagccagtattcttgcctctacatggtcgtaggcatgtctgcaattaccccaacctctgcccttggaaacttgcacagtggtgagaggctttaaaggcccagaggcctattaaaggttgacctagatggtcaaacacacagttgggaaatgacccttggttccattcatttctcgtggaaaatatttcttgaaatcgttagcaaactttcccgtgatgaaattcccaagaaagcttgtatagacttttcatttcctccaggctacacatgcttccctgagaagacaggagtgggggaggccgcgctcctctggggaccctgcaagatgacttcctctaacactgcttctcattgctctgtagatgagtctcatgggcacgcctaggcttcccgtggaagcaggaaatgctcatttcttggagtaataaatctgtgtatgatattaaaatgagttcctttgagactggctgggggtgctgagtcaaagcaccttggagctgaagcttgggtttcttggagccgtctctgggatgaggtggtgcaggaaggtcaaaggcactttgctgatggaggaacgatatctcaggggagcctactaagatgtgagctgctatttgagaccaggtcaagggaaatcatgtcacccctgcctcatggtcctcagtttcaggcatttgtaacactcggtggcacatgtaggtaccagaaactcccttctgaagtcattgagcttgcctgcgtggtatatgtagagaactcagtagctagattcttacacagcctttttgaagaagaaatttttccctttgaaatatattagtctggggaaagttttagagactagaaggggaaaaatcaagaagataaactcacaattaatgaacaaaactttcttaagcccagctttaaaaactgccagagtagtacccctctcagagaattaggaaggcatgaagaaggcagccacttagtggatgcttgtgggtgagcaaggtcatctgccccaatggctgtctcttgagtgggagggggagcttaaagaaaccagggctgcctagacaaaaactcaccatcttaacgaaccccaaggcacgcttatgcagttctgtacatctttcctacagacttgggtgtgggtttgcttatttcagagggtccctgagtcatctcagagatgaaattgtcctggagaccatctcatctgatcctctgctttgcaaagggaggcaaaagacgcttctgattttttcagcagctatgacaccagcagcaatggcaacaccagactgctgtgacctgttgctggggaacactggggctgtgttagacactttgcagagaagtgaagccaggttacggctttcttgactagaagtatccagatattcttttaaaaaatattctaatgatttttatttaaatcaaaacaatcttattttacgtatgaaccccagctccccctctctcccatcctcccagtccccccaacctttccccatcccacgtccatctgctcctcagagagggtgaggcctcccattggggagcatcaaagtctgtcacatcatttgggagtaggactgaggccctccccactttatccaggctgagcaaggcaaccctccatagggaatgggctcaaaaaagccagttcatgcactagggataaatcctggatccacagatggtgttcccacagactgtttctaggtgttctttactggctttggaatgagatttcttgccttgtttcagcacacctcacagcatgtgtgctccctcagagtgtccttgtccaccaagctccttttgctcgaagctcatttccttcttggttattctccctggatgaagctgctttcccacaagcctggcaagctgtgtctcccagcagccattcatttcaatttcatgaccattatcctccctgtgtccctttccttggtgggaactaggctgcgagtgtcccacgccctccttgcctaatggccccacacagtcctcatcaccatttggtagtttctttctttgtctggagtttgttcattgtctgcatctgccctccaggatctgcaggggctcagtgtatgtgtggtgcctggcaaagagtatgtgcccagaagtcgtcttgtcgtgtgagtgaaggcatgatggagccgcacagctgaaggctttggtttcattctcccatttcattacccggaaatccattcactctttgactgtatcaagtcagcttcacattaatactgtgggtgatttaccaagcccacttgggccatggctttctcacatgtaaaaccagagcacacagagtcctaatctacacgttttctgtaaagattgaaataggtgagctggtttattgtagtgacatattgtttatgatttattaaagcttgcctgaggattcagaaagcaaagccagccacaagccatagaagccaggcacacacctttaatcccaggactcaggattaagaggcagtgggatctctgctagttcaaggccatgctgagctacacgaaattgatccagtcttttttttttcttttttttattaatttgttttttacattccaatcccagttccccctccctcctctcctcccaatccctccacccatctgttccacagagagggtgaggcctcccataggaagtctactcagtctgtcccatcatctagttgaggcaggaccaaggcacctctccacccccacacccctgtgtctaggctgggcaaggtatctctccatatagaatgggctccactaagtcaatttgtgcattagagttaggtcttggaccgactgccagtggcctcatatattgtcccagtcacaccattgtcacctatattgagggagtctagttcggtcttatgcaaattccccatttgtcagacctgagtcagtgatctctcactagctccagtcagctggtcgtgtgggtttccccatcatggtcttgagtcctttgttgatattatcgttcctcaatcactttgattgtactccagagcttggcccattggttagttgtggatttctacatctacatccatccatttctggaagatggttctagcttctctggggttgagtattgtagactgggtatcttttgctttatgtctagtatccacttatgagtgagcatatactacatttgacttcctggttttgggttacctcacttaggattttttttctagttctgtccatttgcctgtgaattttaggatgccattgtttcttaccactgagtagtactctattgtgtaaatatatcatattttctttatccattcttcagttgaggaacatctaggctgtttccaagatctgcctattacagataatgttgctatcaacatggttgagcaaatgtcgttgtggtgtgaatgagcctccttagggtatatgcccaacagtggtatttgcaggatcttaaggtaggttgattcctgattttctgagaaatcgccatattgatttgtacaggggctgcacaagtttgcactcccaccagcaatggaagagtgtcctctcagacataagctgtcattggcatttttgatcttagctattctgatgggtgtaagatggaatctcagagtggttttggttttcatttccctgatggctaaagatgttgagcatttccttaagtgtctttctgccatttgagattttctgttgagaattctctatttagatctgtactccattttttaattggattatttggtattttgatttctagttttcttgagttctttgtatatttcggagatcagccctctgtcagatgtggggttggtgaagatcttttaccattctgtagggagccgttttgtcttgttgaccatgttctgatggggaatgtactatgtatgtttatcttattgactgttaaataaaatactgtttggccaatgaaacggcaagttaggcaggactaggagtcaaagaggattctgggaaatgtagtagagaagtggtgatccaggcaggaagtgacatagcaaggagactcatatttaaagaaggagaaacaggaagcatccctcttttcccctccactcctgctccatcgacacaatgtgatccactggcaaggagggatgccaataaggcgtccgataagataagtcttatagaacatataggtttatgatagttaagactgagctaacagatgagaatcctagtcattggccaagcagcactgtacctaatacaagtttctgtgtattcatttgggcactaactcaggtgggcggctggcgtaaagctcacacgtggtggtggggctcaggtagcttttggtggaaagatttatcgtaacaatgttctttgctttacagaagcttcttagtttcaggaggtcccatttattggttgttgctctaagagtctgtgctactagtatcctatttaggaagtggtctcctgtgcctatctgttcaaaggtatttctcactttctcttctatgaggttcagtgtggatggatttatattgaggtctttgatccatttggacttgagttttgggcatggtgatagatatggatctatttgccttcttctacatgttgatatccagttatgccagcaccattcactgaatatattttcttttttccatttttagattctttgtcaaaaattaggtgttcataggtgtgtgggttgatattgggtctttgattcaattccattggttcacctgtctatttttatgccaataacgaactgttgtcattactatatctctatagtagagtttgaagtctgggatggtgatgcctccaattgatccagtcttaaagagaaacagctcacacaaaggtgatcttagcacttgggatcacacgcctttaatcctaggactcatgagagatattttagacaggaacagggtttcagagctcacattcattcttcagccacattgaggataggaagtcaggtagtctcaggattctccatccatgttgaggagaacatagcagtctgaggtttggtggagctaggatcccctttcagtctgaggtaaagtaagagctggtggccaactgttttgcttttctgatcttcagcttgaagtttcaaccccactgtgaatctctgggtcttttatttattatgcacagtttatataaagtattgttttttagaacctaaaaatgcattttttgaaattacacacacacacacacacacacacacacacacacacacacactagttgtgagtgactgttctccattccaggggacaaccacctgtatggaacccctcatatagagtctgcaaggagactcaataaattctctggttccccagagtgaactttggtgcaattgtgccctggtttgccattgagaccttgggaggaagtgtagacactgctttacatctctcccagggaaggaattttagcaacaattgcgtacacccccaatcctcctcctctctcccccagagctcccacaacaatttccctgcttacattcatgttctccttctctttttaatagccctctgaattcagtcagggctgcacacagaggtgtgggaccatctaccagggcatgggccatctatcatcatccacatccttaaagaattaggattccttctgaaagcatccctcaactgttatgcctcagctagggtggagcttgttaagcccctcccatacctgtagttggttgttttactcttttgagaggcctgccacccagttcccaaataaaatacatggaggcttattatttcttaggaattcccagccttagcttgcttgtttctaggcagtttttcttaaattatcccacctatcttttgcctgtgggcttttatctgtctctatgtctgtgcacctttctttacttctcactgtgtggctggctgtgtagctgggtggctggctcctgatgtccttctcttctttctctcactcctacatccttcttgcttcccgatcccgccttttctatttattctctctgcctgccagccctgcctatcctttctcctgccttgctattggccattcagctctttatttgactaatcaggtgttttggcaaagtagcacagcttcacagagttaagcaaatgcaacctaaaagaatgcaacacacctttgcatcattaaacaaacgttccacagcataaacccgagtaacacatcttaaaataacatacccatgctggaatgttgcctggctcgagcttgtgctggtcttgtgcaggtgaccacagctgccatcaggtgatgagtgtggcagccatgtctgattctgaagaagcttttcactccccacctccccatcctcctgcttgtacattctttccacttggtcttccacagtgctctctgaagtctgtctaattaggggggatcactcaaccatcacttagtctcagcactttgccgtttatgagtctctgcattgattgtggctccatacaaaaggaggcttctctgatcaaggctgagagcagcatgaatctatgggcacaaatgtcaatatgtggaaggcagtttgacagtgtgtccgttagtaaaacaatggtagtagctctctcctatggcccttagttctgcctccctccctcccccctctgtgtttgtgtgtttgtgtgtgtgtgtgtgtgtgtgtgtgtgtgtgtgtgcacatgaaggccagaagttgatatcaggtactttcctcaatcagtctccaccttagttttgagacagggtctctcaccctaccaatttgagcagatggactggccagcaaatcttcgaagtccttctgtctctccctccccaatttggattacaggtcttgctgtgcctggcttttgtatgtgggtattggagagcagagctcaggtcctcacacttgtgaagcaagcactttaccgagtgattcatccaccctttgtttatggtgcaaacattcagaatcactcctttcagcttttggaagcacacagtccatccctgcttcccacacccagttttctgatggggtctgaagggaggaaaggcatatgagctttggcctgctttttgcggtccttttgaaacttcagaaacaacttgatgatgtcaaaggatgaaaaatctgaacagctgattccatcccaagcatggagatcctgaggaagaaagaccatcactgtgtagggccatctaatctgtcttgagacatgaagccgcaaggaagaacaggctcttagccttggctgcccaccatccacggccactgaaacagaaagccttctgaagcccctcgacccagtcagtctgccatggaggggctttggctgcatgcatgggtgcaggctctttcggtcttctcagatttctctttgttttacacactgtggatgtgtttgttggcccaacaccaactttaccacttaacctctgcttgccccatagctgaggccatttttgcaaggaacacacacctctgtgtctgcagaatcttggatccttttggggaaagccatgctctgggctggtggggaagaagagggagctatgtacacacagctgaagatgactttagcacagagtttatttaatacatcctccaaattgtattttgaagcatctgttaataagaaagcactctctttttgagcagcgtgagggttttataaatggaatttgcagaccagcaacactcccattaattttccctgtctacaattactatcattacattcttaaagcacttttaaaataaactaccccatgatgtcatgtgcacattctgaactccagcaagagggatggcagggtagcagcatctggaccttggactgctatcttttagggaacatcttgatggctgtaattactgtcatgttatgggaacttttgtaaaaaaaggcgcctgagttccaaataaaacataaaatggctttgatataataaatgttactatcattgtttaaaaatgttgtgacccgtctgctgtagtttctgagaaagatattttccagctcttgatatttccagcccccgcccccttcatagtctattactgaagataaggatgaagcaaacgctcaggacagacttgttttaaatcaacataacacaatgccagcattgtctttcttcaagatgaaccttcaaattaaatttggtatgagctttaccagatctctaaacggctttgttccagagacactgaattcaccctattagggagaattaataattcaaatgctgtagttgtggataattgcattcattaggataagacgggagctgaggcaatttcctgcagtgtgtactgtgtgcatcacacttctgaccaaggcagttagaagagtttggaccactccgaagggaaaggagctaccccaaatgaacatgtggtctagatgttgccttcccgtgggatccagttttggagaagcctgtgacaaatttgtctcaaggcactggaccaatttcttcacaaagtgatgaagaagaattgtacatatatgaaagaagacatccattgtgtatgctgaccccatggtgggattcacttgaccttccaaagaagtttcctcatgcaaaattcattcaaccttgtgaaatctaagttcccatttcatgatgggtgttagcaactttaaggaaggcaatgcatcttgcttgggcagctggtagattttggcaatagcatgtacacagaacccaaatggagcaatctggtctgtggatattttttttttctctgcttgtttgctgataacattgttcagtttgaagatggaccttctgatgtaagagttgggacttaaccaggaaaaattgatttgacctgatctggatttcatcatgttcagtaagtttgtcatcttttcacatgtcacaccagctgacagtttttctatgttctcccacttgtcaactgcttatttcatttggtatcatgtttcttgttttatctacattttacccacacatctttcctgtggataattagccgaccagaggattggaggaacaatgcttcaatcaccagaaagtttcttatgcttcgctccttgtagtcagcactggccagctccctggactaggcaagtaagatatcccaaaacccaatcaagcagaaactctgctgctgctgatggacagacacattggaccttctccatacgtggagccaagttcatggctaagggctgtctagaagattgcccttttcttacatgctgggcttagtcactgtccttcaaaatgtcagattggaaaaaaaaaaaacctgtggaattgtttgaagggatgtgtgatcaattaatggatggcaattttcacactactcaaaagcctgggtcgggtttttaattttgctttggtggttacaaattggaagatgaacacgattattctgtctcgtaactacagcctatatgagtccttccatgcttcactgtcttcagcatggctcctgaggactggatatttaataaggactagtggatgggaggaacatcccaaagaatcttcttagaaaacaaatggaaccttctcatggaaacaatattattccttttcaacattaagtagtgcttcatgaaaggacatcagaaacaccaactgagtgtccagtccactctctgtttgttgaaacatttatggttcttacttaagagggagaaataacaaggaaagaaattactacaaatacagaacattttattataaaaataaaaaaggagagcaaatctgttagctcctgccaacttttgaaatatgaattccatttgtctttattacagtctattcccacagtgccctttccatgtttattaatttttgaatgttactattaaacagagatttgtgcctactagtaatagttaaagctacggtcaagaaacttaagaaatgagaaaaacacatcagctcgtcttttcattttcacatcaataaattaggacatgcacaattaactagacttgttatctttagaaaattttcttatgtgttatcataagagaacactctgtcaggtctacacgaatagtgatgactcataggtacgtgattcttcttactaaggaaaaaatgacacaggaaatccaatataaatgagctgttttcctcagtagtataataaaacttgcatgctgtgtatgagtttttgattatatcattcactgatcatctctaggctcatttccttccagtgaagaagccgtctccttcctcctggcactggcccccttcggccactaacctttagcaatcttactccctcacttggggaagaggccgcccagttacagccaccacagtgtagtatattttaagggctgtaaatttttactgtcagatttgagccaggggtgttaagctccaaagatacacatctgcttcctgctcaaatggtcttttgttgtgcttcttggtagagggagagttttaaggccatcggaataaatcccagtgtgggtagggtgagttatgctacttcaagaaggtaggttcatggctgcaaatagaacctgtcttgactctattcttacattctgcttgtcttcttttcatttttccatgataatattttattgctatttaatgaacaaaatgagtcactattaaatttaaagtgaaaaattattttgtaacctgactcagaacctctgaatgtatctggtttctaagtttggatttcctagtgtcaggttttcctaaatagcatcatatgaactcagagccagaaaacaaatgaaatgtttaagaaatcacttgggaagagtgtgcctatagcccatgccaatatatctgtatactgtgagtgtttattaaacactgactagattaatcaaagaacacagtattagatgcatatttatcctaatgctcactaaccaaaagtagaaatatgatagaccaatttcatagccaaggacaacgcaaagagacaatatagtcaaccttcaatttacaaatggctttttctctactttctattttaatactttcttttggaactaccaatgcattttcctatagaaacaaagtgataagtagtggtaaggtttcctagcaagtccagaatacactttacttgtatgtagctaaaaactagtgtggaagaactcaattgacaagtttttatttttattttttgtggaaatatgcttgttttttcacccaaatatatatttggttggaatacaaagatgtcacatgtctcagatggtaagtgtatcacagctacacgagtcaggagatgatcatcccttagcctctgttgcttggtggaagatagcacagccgccaaatgtggaaagtgtcagcatggctctcagaggtgcccgagctgcatatgtttgctgactgagaagaatggagtcaagggagggagttgcaagaagagggctggcttgggagtggggagggatgacttaagtgtgttgtcttaagagactttagcctttgaaggatgaaagaggagaatgggtacatgaggtctagaccaggagatcttgacaaacatggctttctatttctcctcagatagatgctatcatgctttcaccttagccctcctcctggtcactgtgtgaagggtggatgggagaggccgccagcataggacagagaggaagtcaggagtctactggagtcatctcagggactactgaggaggcgctgggacatgctggttgaaggaagaggagatgggttagaaataggagagggtctgaagatggagcggaaagaatgtcagtgataaagaggagatggaaggatcgtcaagaaaaatgaggatgtagaggacatagacttggggggtctctactcagaaggttggtgatgcgggtaggtacgtgggtggtctgtgcgggagacaccgctgaagaactggaccttagccagaacaagaccatactcagcatggaggaagacaagagagtgagtggttcagagattgagactaaggggtgaacattggatttcacattgaagaagatgctggtgccctgaattcagtttgggagatcaagaacacatctttgtctcgcattggtcgctttcccatagaacaaacaagcagtgctccagtgatttgtggtgagggtgaggctatgtctggacagtagtgaccactgaattggaacagtgattgtggacagctgcagctctgaatggaggggagtttgaagacacgtgtgtgcacgagtgtcccagtgatggtaaacccagtgtgagtgttcttatgttgaacagttgtgtgatggtcagggctacagacatagtttataaacaaatctattcttaccacacactatgtaattatctcccggagtaccataaactaaggaagcatgaaaacaccatccaaacagtgtagtagagcatgcagactggctctcattggtcccttattttccactcttcttggcattcctcatataataattgtctgtggttgattgttagaggagggagagtcaccttttgtttcccccactgtgagacatgtgcattttttataaataaagttttatttaaattaaaaacaatcttattttacataccaatcccagttccttctccctcccattctctcctgcccctcaccaacccccatcccaccccccatgcactccccagggggggtgaggcctcccctgggggaatcatcaaagtcagtctcatcattccacagggctgtcccttttccacatcccagtggatggccccacccatgtgcatgctggcaaaacaaagggactcagaacattgtaattaaaaagtaaaaggactggaaatagggaaggagatgtgttgaggggacttggaatagggcgcaaggagaggaatgatcaaggtatactgtgcacatacgtgggactttcaaagagtaaataaaaagaaatctctatacagtgtagcatcttttcaatgtgctgcatgcatcttgactgacagtaggtggcaaggggtgagtcatcactcctgccctaagcatctagaagagtcagatgtgttttgggagaaactccatgtcaccttttgtgaaaaagaagtgctaacaagaccctgcaagaggatctgttttaaaaatctcagaaaccagtaaagcttgccgtgaacagccatctttcagggacatcgcttggtgagcttgcagagcatgtcctacccggcctagccagccccagagaaaagcttcaagaatttcttttgtgagtgcagttacagctagcgaaactaatccatggagatgactcactcactggcaggaagtgacaggtgtgggtcccaaaccctgaagaaggaaggggctgaaatctgatgtggttttcccagtgtctttatcaagatgatcccctttccatctgaggctattcaagacacagccaatgaaaggagaaatctgtgctacgggtcattcggggctctggcaccagagatgcctactttgcctttgaagtgcggacggaggaggcaccgcctctgatgttgcctatggtgttagaggacgactccccgtcccagctattttttccttacatccatgtgactttcagtaaatgctggttcacattgttaagcctaatgacctcattgtgaggtggtacctgataacgccaccactctagcatccactgagagcttctgtgtgctgggaactctttttatgtgacttagttctccttggtcgcttgggtgcggtatcactatatagatgtgaaacttggggtttacagaggctatatgtcatagccacagaagggagttgggggtcttagtctgaggcacttggaggcttcctgaatctgcttctgagctcttagctactacatcaagcactatgtttcataagctaaaatctttgatgattaatcttcatttttatttatgttttatgtgtgtgtttggcacctgtgtgctggtgcctgtgaaggccagaagaggatgttggattgcctggagttggaattataggtggttgtgagctgtcagatgcaggtggtgggaactgaacttgggtcctctggaagagcagcaagtgctcttacccactgagccatctctccagctcccataactaaaatctcgctgccagtgcccagtattatgaagtgtgaactgtctcaagactgagtcatttctgaaactggcttctctgcagcctcgatttaccacttagtcttgagaccaaactcccattcaaactgtgcagtaacatcacggctttgctaaacatcaagggcttctgagagtgacacattaaaaacatgctatttttgtgggaactcgaggaagagttctctgacacatcactccacacaaaagcaccaccacaaatggcttaaacaggtatatgtgcctgcagctatcttccttccaagaaacatttacccatgtctatcagaattgaaatgttaagaaaactttgaataaacaaacaaaccaccgtcaagccccctaaccactcgtattgctgtatttagaaacaaccactcaacatcttgttaagtatcagtattttataaacaacagggggattgtgcctgctgtttgggctgacacgattcacgtatccacagcaagtacttttcacactgagtcatctccccagcccttttaaactttgttttaatagaaggaaatctgtttccatattaaaatttcaaatgacttacagaagtacaaacagcaaaagccctaacttttggatttgttaggtcaacatcttagagttactcatccgttagcagacagccaatagtttcttacttcccagtctggagttttctgtgtgtgtaagcatccctccctctccagccctaaccccactcacatttgctgagtgcataatatcctaggaaccctcctaggtactggagcagggatgggagcggatctcccataaatccccttagtttgggctgttgaaccttccggctctcatgagatctaagccgtggttgtttttcctgcttatttctcatgttcacgagcacagatatttaagaggtacctattttcatttgaaagcaaacagctttcaaaaaatttctcttttcctttaggtgcagccattttggaaatgtcatattgaaaacacaggcgctcccatggcaacaaagggggttggtttgaagtgggcatctctttgttgtggctcagagatctaagcctggtttctgggaaaccagttgatgtggaaacgaaagagattctgtgtctctcacactgagccgccactggactgtcaatcaggagttttaccaacttgaaggggaagtctgagactgaaatcagttggcacttatctgtgtgttcctgctgacactctgtttctggttagcttcagtgaattgccaagaggagaaaaccacctacccaatggcttatggaaggtactacattgaacattgacctacagctctcctctccctacttggagaggtctggtgacgcccatggctcagcgctagcgcatctgcctagtactcataagaccccgaatcccatcctcagcaccacaactctctgcttgattgtgaagggtcagaattttatcttttgggcaggaagtacccacagggcttgtctatagagcttactgatgcacatggggtggggggggggactactggggaggtggctatggctagaagatgacgagcaatgaggcattgattgctctggtaagccatgcatgcctgggtagccaaggttccagggaacttcctttattgttgagattggacgaagaaattgatgaaccgcttgggactcttgggaagatgttccacctctcatcaacagcacccctcccccaatcctgattcagaagaaagtgctgcgcagtcacctgggtgggcaatgccttctaggtcctccttggggtcacctccctctgcagatgttgctacaggtgaagccagttaggagagattggtgctgcgacctgcaggtctctttcacaggagagctgggctaagcttatagacaggcagagcaatagagatgacaaggcttgagagaagtagatgacattgttttctggtcttaaaggaaaattggacagttctgaaataaactcagaatgttgtgttgtgtgtacgtgcctgcaagtacctgcaccggcgtgtctgtgtgcataggctaggggtcagatattttctcctctttctctctccattatttttttttaagatctctcattgaatttggagctgaccagtttgacaaaactggctggccattgagcccccaggatctcctctttctgctctcagctctggggttatggacactcatcaccatatgcaaattctatgtggatgctaggatttgaactcatgtcctcatgtttgcacggtaagctcttcactgactaagccgtctccccaacttaaggcactttggaaggaaactgaggtagcagtgtctataatacatgctataggcaatgcacctgcaaaagtgttatgggggtataatttatagaaagtttttattgcaaaagcatcacatgttttttttattttattagttcaaattaggaacaagcttgcatcaaatgtcaatcccttctccctctccctcccctcccccccaacatcccagctgcccctagccatcccccctccactccccaggcagggtaaggccctcaaaaagagctccccaaagtctaccacatcatcctgggtcaggcctcggcccttcctcatgacatcacatttttttatatggttttaagatagagacacacagttaaagaaaatccatttgcccattcagctatgaccatttgtatgtctgtccatccatccatccagccatccatttgtctacatttgactatttatgtgcattttagtttgtgattcatttgtctgtacacaggtatgctatgaacattttcttatattattgaatgtggttagctgaattttgaaagatttcactgcatgttttagtaactgtcctggatggttttatgtcaacttgacacaagctagagtcatttgaaaggagggaacctcaattgagaaatgcccctataagatccagctgtaaggtgttctcttaattagcgattgatggggagggcccagtccatggtgggtggtgctatccctgggctggtgctcctgggttctataagaaaacaggctgggcaagccatgagagtaaatcagtaagcagcacccctctgtggcctctgcatcaggcctctgcctccaggttcctgtttgagttcctgtccagacgtccttcagtgattaccagtgctgtggaagtgcaagccaaatcctttcttccccaagtttctttggtattgatgtttcatcacaacaataaatactataactaacacagtaactttcagacatagtttaagacagtcagaattatggggacttagatctgtggaaaatattatccattcagtattaagttgattacataatatgcacttggtttggggaaagatgtagtagctatacataactctattcttcctgttaagtgcaattaaaaactgtgctactaatttttttttatcaacttgatacgaggtagagtcatttgggaagagggaacctcaattaaggaaatgatctcatcagactgacctgtgagcaagcccttggtaaatttcttaaattagtgactggtataggagggcccagtctatgttgcatggagccatccctgaactagtggtcctgggttccataagaaagcaggttgagcaatacttaaggagcaagtcagtaaatagcaccctccagggcctctgcatcagtttctgtctccaggttttcgccctgcttgggttccagctttgactttgctcagtgatgggctgtgcctgtgagtgtaaataaaataaacccattcctccccaagttgcctttggtcctggtttttatcatagcaatagaaaccccacagacagaagctctgaacaaaacatactgcacaaatgagggctttaaaacttaagtacagagaagtcagaagaatttgagacccaaggatgtgacatggcaagttcctcaatcttttcttccttccttccttccttccttccttccttcctttctttctttctttctttcttttttttatttcatatacccaccacatacccaacactggccatgtggacatgccagcaggagtagacaatggtgcttcctcaaagctgaagacccagaaagccgaagactagcgagacatgctaaatgattttattccagcaacaccaagagaaaagcatgactccaactcccctcataccatcaacagtcaagtggggagcctggatttctgcctctccgaagctggaatgagctatgttaccctgctcctctgggttgatatgtgtgacatctggtaggagatggagcttccattcaccactgagtaatagtgaggactcttctctttcccctctccctctttggtctcagtagagactatgtgggaagcctggttacagccagagccacaggtgggtggtattagaggaggcctagtgaagggtggggaccgttgctgccccatgtgggcacccatcctcctgccttggtattagtggtggtcatttggagagaagtaactcccactctgcccagaagtaccggggagctctttgcacttctccagtgtgtcagtggtgcccaagtgggaacctgtacttctctctttacctgggaggagtaagaggcactctttcttctgctgttaggcctgtgttagaagaaaccagtttaaacaggtttggattgttgtaatttaagaaaagtggtacttggcacacaagagaaagacaccatgcaacagagttcaagcacaggttttttttttattagggaaagggatcataaaaaggggacagggaggtgggagaccagcctccagagacaggagcagcaggagagaggaaagaggagaaagaggggggaaacagagagaggaagagcaagagagagagagagagagagagagagagagagagagagagagagagagagagaaagagagagaaggatgggagggcagggcccttttaaaagggaacatagtgaatgtgcacaggaggtgctcttagcggctgcagttgagggtgtgtcctgtcagagccccaaggtcaggtcagtacagatgcctgaatactaacatggataatatcctgagttacatggtactgtatccaagctattaatatttttcatttaaaaccatccattaaaacaacaaacaggaagatctcaaattgaaaacagaaagttgatacaaacatggtgaggtatggtataacttggaacataggcagaaagacttcagtgagttcaaggccagtctgggatgtacagcacaagactctatcttaagaaataaaaactagatactaacagcaagctgatgagttagcaaaaagatttttaaatcagttgccatagaaatactttattaaaattataagctttactaaaaccacaaattataaaaatatccttaaccaggaaatacaaagtctcagaaaaaaacagaaatggaaaatttcaaactgaaaatatagttaactaaaataaaatgcttaatgcataggttaagaagcaggaggggatgggagaggcacagaggccagagtcaggtaaatagaagacagaaaaataaaaattacctaatgtaaactacacagagaaaagtgtacttggaaaacagcgattagtgcttcatgacccttggagaatataacaaaagaattaacgtgtgttgcaagaaatgcagagaaagagaagaaagacattgagaccaggaaagaactctaataaaagacaaccaacaatgtctccactttggcaaaagataattttggcaaaagtctactaatttgagaagcgggtgaaatcagagaagacaaacccagagacacccagtcaaggaaatcacagtcctactggaaaactgaaggcagtaagacaatgctggatgagaggggcatcttacccacaaggggtaaacacttaggataactgcaaatttctcatcagaatagtataggagctggaggagacccgcatggcatttttgtaaaaagcgtttccttcaaaaaatcaatgggaatggggctgggaaatggctcagttggtaaagtgcttgctgtacaagttcgaatacttgagttctgcctctaaaactcatataatgtagcccagggcagtcttgtaattccagccttggggaggtggagtcaacctagctgtctaatcagtgagcctctagtcaatgaggtccttcacctcaaagaacaagatgtaaaccttccaagaaagacattagagggtagttctctgacctccatgtgcacacacacaagcccacacaagtctacacacacacacacacacacgcacacacacacgcacacgcacacgcacacgcacacacgcacgcacgcacgcatgcacgcacacatgcacgcacacacacacacgtgtgcacacacatacatgtgcacacacacacatgtgcgcacacacacagagttaattagagccatctttctagctctatagtaagttttggtcaaatctaaccacattccttctcctctaactcctcttataccatgaccactgtttctgctcaactacacggactccattttaaaattgactgagtccactagtgctgaaaatacgttcatggatgcagggccactcattagaacatggacagccagtcgcccacatcagaagaaaactgattctccctctcctggcagcatcagttaccaataattcctcacctttgggtgggactttgtgatccctcccctgaagtttaatcttgaaaaaaatacacttgaaacaatatttaagggcaagtgtcacatacaggtaaacatggaaagcctgtctcctaattaaaaatccacatttagtacaaattgtatttaccatatcattcaaactgggaatttggctgccagaatactgaagtttgaggagaattttattctgaaaggaattgtcataaacggttctgaaattttgtctggtttctctctttccagtctctctctgaagtcctattctgttctcatcttggcattggccactctgtttgccaagtatctgggagtaaccggtttctgcacagggtggcgttatttgatgaaaaaggtccacagaaattccaagatctttgaaaatactttattgtgcataaaataacaactttgatgaatgaggtggttttattttgtgaaaggattttaaacagttgaaggaataatttaaaaaaaaacaaattttagagaaagtggatgtagttcagcctaatttttgctgttttatttttctttccaatgtttcagtgattcttattttattgtatttctttttttccttccattggtttttatttttatgtgtgtggaggggcggggggaggggggcgcgcgcacatgaatgcagtacccatggagtccacaagagggcgtcacatcctctggcactagagttacaggtggttatgagctgcctgatttggttgctaagaacagaacctggctcctctataagctcagtaagtgctcttaagccctgaaccacgtctccagcccagcttcattgtattcacacgctggcgtcttccccgttccttttcaatagtgatgataaaggaacttcgtttagctcaaacgctgaaacagatcattaatctctatcataggcactctgccacccgtctctcgtctccctctctttcctcttcctcacgtccttctctttcctgttagaacatattgaattgcaattactgaactcttttcttatagaacaaagttttgtcttctaaatgaccacaatatagtgactagatttgggagacgaacactgatacaatatggtacatagcatccggatccaaaattattttctaaataaagataatttatttttattttatctgtatgagggtttggccgcatgtgtgtgtgtacaccacatgtgtgcctggtgccctcagagcggggcccctaaggaaaggagagaaggagagagggaggaagagggagagagaaagggaaatactaattataatactaatactaattacttatgtgtttcagtgcttgatctaagtgaagttctttattgccactatcgacggcagaggagggcaccgggtcccctggaactggagttccggactgtgacgtgtgatcacgcaggtgctggaagttgacctttgcagggggccagtacttgtaactgcggagatctctctgcagccccaaatttagtttttaaaaatcgaacaggtggtgtctccatcctcgccggcttcttcccctttcctgctcccacgccttccagttcccgccctcctttccccctcatattcttcttcctgtcccctcctcttctccctcttcctccttcccccaccttcctttcctctccctccttccttccctccccctccttccttccctccccctccttcctcccctccccctccttccttccctcccctcctccttttttctccactttccacttccttcttccctccctccttctgaaagactatgttaataggaaggaagtcctgcggagttttgaactggcaccctccaggttcacctggggctggccgagagtttgcctgctgcctgttgttcttggatgttgatgacactgattctgtttcccagggacccttaggaggttttcaacaactctcaggaatctaggcattctttatagaactcgaggaagcagaagaaaagggacaacttgtgtctggttttctccttgaatacaggacttagctccactccatttcctggtgctccttttcttcttaagtacgtttccttgctcagcttgctccttgtcattttttctcttttaaaataaccacacaacagagtctatactaggctattttgagatttcctttgccaagggaattaatccaaagcgtttcactttagcctcaggtaaactttttggacaaaggcaaaaagcagccacatttttcaccaaaatatcgcaagaatgatttgtaggcaacacactaaaattcttctcctctgaaacatcttcagaagcttcccctccagttcaaatcactgttagtaccactgtcttctatactcctcctggtatggaccattaagcagtacttaaagcattccactgcttttctaacctgaactcccaaagttcaaattcctccaaaccaaagcatgattagaactttcacagcaatatcccagtccctggaaccaacttttgtcttagggtttctattgttgtgaagagaccccatgaccatggctactcctataaaggaaaaacatttaattggggtggcttatattatcatccattatcatcatggggggagcatggtggctgagagtagggtcacgtgcaggaagacatggtgctggctacagcttattcagaaaacaacaggaagtaaactgagacaccgggcagtatcttgatcattataagagacctcaaagcctgcctccatagtgacacagttcctgcagcaagagcacacttactccaataaggccacaccttctaatagtgccactccttttggggagccactttctttcaaaccacagcaggcatcaatgtggccacatgtggtggcccagacccaggacatcctcatggcctttggtggaaacaggagccaaggacatcaacacagaccgtggctgcagcagggcaatagatccagacatggcccttggcagcatcccaagcttggatgtcaccatgacctaggtgtcaagcaggtcgcccacatcagcctatccctcactgatctgcctctctccacaggacatgaaccactgcctctctctctcattcactaccatgcatttgctcaccttaatggtgccgatggtttcttctactcgaccagggtaggctgctccaagtgggtttgtggatgtctatcatctgtccgatcctagttgctgagatttttaaaaatgtattaatacttccgtattccttttagttacacagaatagatactatttctgtgattaaaacataaaagcatagtaaacataataaaggtgttgaaaggcaaaggactaacagcaggcccttcggattcacacaaatctagggacataatgtttggcacagggggtcacctactcaatgaaccagtcaatggtatgaggttgacattgttgaatttgaaagaatcctcttttccacaaacctgttctcccagataaattgctttcacagtcttcaggctaagacaagttttgttgaacaaggagagatgaaaacttgaaaggaaataggactttattttgaagaaatacatcttggagaggctttccagttggaccctagcagaggtgtcagcaagtgccttcagaatgtcacagatctttgctcttgggggacccctgggacttgtgattcttaggctctactcaccttgtgggagctcttattttactgaaggcactctcaattccagactctgccaatgacttcatcccaaatgatggaaatactgaatgcttacacagccacacattttgtctatctccttacaacacaggtgctgacacatttcatttaacattttcctggtaaaatgaaaatgaaaatatcacacagagcactgagataaacttttccctaaaaatagctttcattatttgaattctgtcagcctgcttctatccagtatccagtcttggaagcatccaacttaaatttctcttgaactactgttatagtaagaagtgacttatttttctctccatttatttttgcttccaaactgcaccatccttctcactgtgatgattccacgatgtcagcccctctggggcctcacacaaaagagccaagattccttttcagaagtaccagggccagtgacattgacagcaaagagcccagtgtctcttctccactcccttcccctcagggagcagcctgcccccaccatagacaatgcctcactaatggaaactcccagccactacaactctcttcacctcaccagacactttcagcttggaaagtctttggggtcctaacacgttctcagatacacccctgtgtgcctgccggaggcgaaatgatacgttgatcagcgggaggaatctgtgccacagactgtttggagctttggaactttatacctggcagcaagtggtaaatgtcctcttgatgtggaaaccccagccaccttgcccctcagagaaggtgggcgtagcaccagtgccctttcactcaacattctgtgttaacacacatgcaactgtgtctggagcctagtgattgcattgtgcacatgatggtccacaaggcgtagtcccagcaaccactggcattgacaagggttggcttcaacagatacaggctggagagccaaaagactccatcccccgccccccatcgtgtgctatatagatcccaaaataactctatccaccacccctttttgtattcttacttctgaaaaggacagaccctgaaggagaattaaacgatgatgggagtggcaaacagcgcttaatgatgttttggttaaccatcaaaggaatttgtcggcacttgcaatgacttcacttcctgtgcttggaacacattttatatgccacacagtgatttgtgggatgtgagttttaacatactactcacacaatgggcagatgggaaatactgagttgagtgctacccaattaaatagcctgacacccatttctagtgttaacttcaaggaccagagacagcacccttttctgggtgcatcaagaggacttggactcttactgtatagagttgttacatttcaagggacatgatttcatgagtagccttgccaaatgttttcaataacaccattccattgtatttctatcatagtcctacagtctcaggaatttaaaatctggggcggggggagagagaagaaagttctactaagtccaagttaccaggggatgaagttgtcatcagacatgaaggccagcttcttgtgcttctgtttttctccttaggtatttttcatctaagttgggttttcctgtatggtatcatatcctctaacagccatcaatgggatgagattgaattagcttcttgtaggaagtgcgctagatgtgggagtgtgtgggtgtgttcatgaactctctctctctctctctctctctctctctctctctctctctctctccaccctatccctgtgtttggacattgtttttcctgtgtcaggaatgtgcagtgtgcagagctactgaaagagctgtgtccacaagccacaccccaagttcccagtactgtcctctgatctgatgcctatcaattcaattactcaaactcttcaaacacttctctttcttactgccatggaaaagaaccctgtgtgactacctactttacccacaaggcaaattcaatgttcaaagttcaagtattgagggtggggttccctgtccacatgcttggatgacagtgtttgccctttgtggaggacatgtgcaaattctgagcgagctgtaaggacaaggctatcaagaggactatcccagtccaggaagacacaaacctactggaaagatgagcaaggggggcgtctgatattgaataaaggaatattggcttttgagactaaaattagtgagtgagcctaggtctggaaagattcatggcttctcatttcccctttgatgattctgtgatttccattaaaactgtaaacaacaacaaagtaagtcaaagagcaaagcttttggtcaagtctttgtttactttttttttttatttatcagcaaatctgtactaatgctctgtatgtctttagtctctcttctagcagagagatctatgtttaattggaagagatgaaaaccattggctttgttgtaaaaattctgacatctgactagttgaacattaatcttcatttcagcagtaattttggtttcttctctttaagccattttgactaggtgttgaagctagatggcctttctttttggtgacataactatagtgctctgagtctggggaccctggcttccacacagcctaccttgcctatggcctctgactgtgtgggaaggccccttacccatctgtggtaggggaggctgagtgtctggtctacagtgcttctcactctccactggggacccctgggatgcacccccccctttgcacatctgtgctggatgcagtgctggtgaggcacagcctatgggctccccactctttacctctttgctgagttgttggctttgtctccttggaaaggtttcttgtaactgcctgggcagcgggtggcatagctgcctgaagcacaaggctgtattttaatggaaaaatgaggtattttccattgtggtaagtgtctcttttttttttcactcataaaaatgttcaaaagaagaagtaaaaaggggaacatatattcatttgttgtgactgagttcgtaaattgagttctgcagaaagctgtcagacatctatttcgaagaatgatgactttgtttctgcatccaaacatcacaacactttcagagtcgaatagtctctcaaaatgacctgggtttacaaatataactatagatcacagttagtagttgtgtaaggggtttcagtatgaaactactagaatgagagagccagaaaacacacacacaacacacacacacacacacacacacacacacacacacacagagagagagagagagagagagagagagagagagagagagagagaggataaatatttatattagtgaccattcaaatgacaagatcagaaaccatgacaaattaactgattttcggaaggtatagtctagcaggtgtgtggcatgaagatttcagtgaacatgctcttaataactcctgcagccagccttaagagtgggtgcccacactgagacgtactcacgtactaatacaaaatcagacctgttattcagacataccctcactcactgttcccaatagtccccaactgtggaacaatcgctactgccaactgcagattactattctttcttagagcagggagctgagtctgggccgcacagtgttgaaaaccactgcagggagccaccgccaacctctaaccgccaggcttccaccagcaatggttgagaaagcagaagggagtcagacgtggctgctgcccagctggaaaccatggtactaacaagactcaaagtgaagtgagcggtaggcatgtggtgtgcgggctatgattttgctgaggctcccttctggccatcccaggcctggcgggagattgctttcattgctggctaacagttgcatgacaaggatggcagggtaaacagcactactgaggcagacgtgtgtgggggggtgtggtagtttctttaccccaacatttttgcccaagagatttcagcctattccttttagctgactcttctccaaatgggagctaaggaatgcccagaccaaatagagtgccttaggtgaggagcatggcaggggacactgctttcaaaagctgggagcgacagcaaatggattttaggaccactcatgaattgtcgtccctgtctagggtcatgcaaagggaacttcaagggaagtccaactcaccagcttgcctggaagtgggcttggtctgcaggcaaactggttatgagcctgacgtggaggaggtggcttactcggggctgggtctctcccccactcttagttagccttttaatgaaaatgagtctggaaagtacgccagtgggctcctgagtgcactgtgtgtgaggagcctgttgagtctgtagcacttttctgaatgatttggtaaataaggatgacatctgcatgttaagttcattgggcagcatcatgaggagtgatacctgaggttgttttgttgcttccacatgtccacacacatacatacacctgcacataggtacataggtgaatacttgcacacacgcacatgtgcgtgcacacacagacacacacacacacacacacacacacacacacacacacacacacacacagattacaaacctagctatttattatatagcaaatgatgtgattaaagtggaccaaaactatgttgttaaaaaaatattttggtggtcattggtagacaacttaagaatgtcttcttttgggtcatgtttctcagtggctggtcagagcctgcctcagcatgctgaacgtttgtgtgacagtcaaagcatgctctctgctgccttggagggacacctcagggaggatgggcagtttttcagcttttcattcatccggtgtcacatggatccagctatcaacacatgtctctttttcattaagttttttttttttagcattattttatttttcagtgccccttttctggaaaacaattttgcaaggtgcaagctgttcaaatgaagtgctgaaatccctgccgtaggaaaagctccgtgtaccggaccaacacttacttcaaccccagcagcaacacttggaggtttaccctttgccatttagcaagtcccttggccgtgtgcacacacattctgtgtcctggaaacttcctgaatctctccactttatgcttttagggcgatattagttggaccaatattaagctcaaaaaaacaaggttaggaacatccagttttctaacaggatgttagaacagtgggctttctatagctcatggctttactgtctgtctcagagcatcctttagttccacagagactccgtccttaaccccagggttccccagcctccacctatcctcccctacctaccctcctcagtcttcacattgtctgacttgcgtgtcagatatgatattgattgatcctgccttgttttccgaggattagggttctgtgcacagaacaaaggatctctctctctctctctctctctctctctctctctctctctcttctctctctgtgtgtgtgtgtgtgtgtgtgtgttgaagcatatcccgtgtgttatttggaccatacttatactaaaactgttgtttatctgacattcaaatttacttgggaatcgtatattttatttttgaaggttaataacctcagggtagatacttcctgtaccccaagtcccccaaatcttccattttccaaatcctgcatatcaacaggacttctagcagcaaaactaacctctggacagcttcctagtttagtcttgatcatgtgtgtactttctagcaaggagtcatagggggacttttccaagcccctctgcactgactccaagacaaagcttttgtgagatgtgagctagggaccttgctttggctgcacagcatgggtgtttgaagtggccagatggcagtattgctgtgctcaagcagagagcttgcggtcatactttccagaggcgctcctgtggctcctgagttacccagtcatctgctctttcctccctcttttctcacaaaatgtggcctgatctctttgaagctcacctgtgactacatttcttccctccagaacctgtggccaaatgcgttaactactgacttgtcacaatggaagtccttcctaggacgtaaattgtatgtgttgtgtgtgtggtgtttgtgtgtgtggtgtgtgtggtgtgtgtgttggtgtgtgtgtgtggttgtgttgtgttggtgtgtgtggtgtgtgttggtgtgtgtgtnnnnnnnnnnnnnnnnnnnnnnnnnnnnnnnnnnnnnnnnnnnnnnnnnnnnnnnnnnnnnnnnnnnnnnnnnnnnnnnnnnnnnnnnnnnnnnnnnnnnnnnnnnnnnnnnnnnnnnnnnnnnnnnnnnnnnnnnnnnnnnnnnnnnnnnnnnnnnnnnnnnnnnnnnnnnnnnnnnnnnnnnnnnnnnnnnnnnnnnnnnnnnnnnnnnnnnnnnnnnnnnnnnnnnnnnnnnnnnnnnnnnnnnnnnnnnnnnnnnnnnnnnnnnnnnnnnnnnnnnnnnnnnnnnnnnnnnnnnnnnnnnnnnnnnnnnnnnnnnnnnnnnnnnnnnnnnnnnnnnnnnnnnnnnnnnnnnnnnnnnnnnnnnnnnnnnnnnnnnnnnnnnnnnnnnnnnnnnnnnnnnnnnnnnnnnnnnnnnnnnnnnnnnnnnnnnnnnnnnnnnnnnnnnnnnnnnnnnnnnnnnnnnnnnnnnnnnnnnnnnnnnnnnnnnnnnnnnnnnnnnnnnnnnnnnnnnnnnnnnnnnnnnnnnnnnnnnnnnnnnnnnnnnnnnnnnnnnnnnnnnnnnnnnnnnnnnnnnnnnnnnnnnnnnnnnnnnnnnnnnnnnnnnnnnnnnnnnnnnnnnnnnnnnnnnnnnnnnnnnnnnnnnnnnnnnnnnnnnnnnnnnnnnnnnnnnnnnnnnnnnnnnnnnnnnnnnnnnnnnnnnnnnnnnnnnnnnnnnnnnnnnnnnnnnnnnnnnnnnnnnnnnnnnnnnnnnnnnnnnnnnnnnnnnnnnnnnnnnnnnnnnnnnnnnnnnnnnnnnnnnnnnnnnnnnnnnnnnnnnnnnnnnnnnnnnnnnnnnnnnnnnnnnnnnnnnnnnnnnnnnnnnnnnnnnnnnnnnnnnnnnnnnnnnnnnnnnnnnnnnnnnnnnnnnnnnnnnnnnnnnnnnnnnnnnnnnnnnnnnnnnnnnnnnnnnnnnnnnnnnnnnnnnnnnnnnnnnnnnnnnnnnnnnnnnnnnnnnnnnnnnnnnnnnnnnnnnnnnnnnnnnnnnnnnnnnnnnnnnnnnnnnnnnnnnnnnnnnnnnnnnnnnnnnnnnnnnnnnnnnnnnnnnnnnnnnnnnnnnnnnnnnnnnnnnnnnnnnnnnnnnnnnnnnnnnnnnnnnnnnnnnnnnnnnnnnnnnnnnnnnnnnnnnnnnnnnnnnnnnnnnnnnnnnnnnnnnnnnnnnnnnnnnnnnnnnnnnnnnnnnnnnnnnnnnnnnnnnnnnnnnnnnnnnnnnnnnnnnnnnnnnnnnnnnnnnnnnnnnnnnnnnnnnnnnnnnnnnnnnnnnnnnnnnnnnnnnnnnnnnnnnnnnnnnnnnnnnnnnnnnnnnnnnnnnnnnnnnnnnnnnnnnnnnnnnnnnnnnnnnnnnnnnnnnnnnnnnnnnnnnnnnnnnnnnnnnnnnnnnnnnnnnnnnnnnnnnnnnnnnnnnnnnnnnnnnnnnnnnnnnnnnnnnnnnnnnnnnnnnnnnnnnnnnnnnnnnnnnnnnnnnnnnnnnnnnnnnnnnnnnnnnnnnnnnnnnnnnnnnnnnnnnnnnnnnnnnnnnnnnnnnnnnnnnnnnnnnnnnnnnnnnnnnnnnnnnnnnnnnnnnnnnnnnnnnnnnnnnnnnnnnnnnnnnnnnnnnnnnnnnnnnnnnnnnnnnnnnnnnnnnnnnnnnnnnnnnnnnnnnnnnnnnnnnnnnnnnnnnnnnnnnnnnnnnnnnnnnnnnnnnnnnnnnnnnnnnnnnnnnnnnnnnnnnnnnnnnnnnnnnnnnnnnnnnnnnnnnnnnnnnnnnnnnnnnnnnnnnnnnnnnnnnnnnnnnnnnnnnnnnnnnnnnnnnnnnnnnnnnnnnnnnnnnnnnnnnnnnnnnnnnnnnnnnnnnnnnnnnnnnnnnnnnnnnnnnnnnnnnnnnnnnnnnnnnnnnnnnnnnnnnnnnnnnnnnnnnnnnnnnnnnnnnnnnnnnnnnnnnnnnnnnnnnnnnnnnnnnnnnnnnnnnnnnnnnnnnnnnnnnnnnnnnnnnnnnnnnnnnnnnnnnnnnnnnnnnnnnnnnnnnnnnnnnnnnnnnnnnnnnnnnnnnnnnnnnnnnnnnnnnnnnnnnnnnnnnnnnnnnnnnnnnnnnnnnnnnnnnnnnnnnnnnnnnnnnnnnnnnnnnnnnnnnnnnnnnnnnnnnnnnnnnnnnnnnnnnnnnnnnnnnnnnnnnnnnnnnnnnnnnnnnnnnnnnnnnnnnnnnnnnnnnnnnnnnnnnnnnnnnnnnnnnnnnnnnnnnnnnnnnnnnnnnnnnnnnnnnnnnnnnnnnnnnnnnnnnnnnnnnnnnnnnnnnnnnnnnnnnnnnntgtggtgtgtgtgtgtgtgttgtggtgtgtgtgtgtgtatgtttgtgtgtgtttgtgtgttgtgttgtgtgtgtgtgtgtgttgtgttgtgtgtgtgtgtgtgttgtggtgtgtgtgtgtgtgtgtgtgtgtgtgtgtgtgtatgtttgtgtgtgtttgtgtgtttgcatatgtgtatgtgtggaggccagaggtcaatatttggtgtctttctcaacattcttcattttattttttgagacaggatcaattgctgaacctggagcttactgattgggctacaatggatggcctgaaagccccgggaatttctgttttcctttttttgcatgatactggggatgaacctgtcttcatgggaacacttttccagtgagctgtctccccagctcatacctgtatgttccatacacagctcatgagtgctgacaagatcttctgagtaacctgcaaaataacgacaaagaggagcatacagactaattgaagtttataagtgcatcttgaaattaactttaaaatatcttttctatgaaatttcccagattctaaaactaacacatattcactgtagttataaacatctaaaaaatatatctaaaagcaggacgctcacaagccacatacaaatctaacacacagagagaaccactgttaatatttttggtggatatccctataactatcctataaataaatgtattatttgaataaaagcagcatgcaacacaatactctgcaactttttttaaataatgatttaacaatggaacatgaatttttcccagtgtgatattgcttatcaatacacctgtgtataattagttctcagtgtttgggggtggttgctgctggtataacacatacgaaacataatttaaaaaaaaataaaatcaattgtgatgtcttagggtagggcctacttatcagtagggaggtgaggcttatttatctgtagggactgcatttgtcttacagagttctgacacttatccccaaattccctgtgtaattgcataggaagttttcctggaagaaggctacatatctaatacatataatgtgcacacacacacacacacacacacacacacacacacacatatatatctatatatacacaggtcagaggagagttggttctctcctaccaccatgtgggttccaggaattgaactctggtccttagacttggaagcaagtttctttacccactgagtcatcttaccagtcacacgatctattttaattactatatgtacataggacatttgggggattctaatctaaacttattgtatttggggctcatgagcaattagaggttgctgccttgcaacttctgtcgcctttgtttccttagaacctggcttagagccagtgaagaggggtcactaatggttgtcgtctgtctgctttaacagcagctctggagactcctgagttgctggggcttcccttggtcacaagccagctgcagtcatgagtgagaaagctggtgtggatttcacaagacctctgtcacaagtgtcacgtttcctgtaggaaagctgaatttgccagcacactctctatgagtaactccactctcagcacaaggcttgcaatgaagagaaaaatgaattctcggcgggaaacaaagctcatccaccaattcctgagtgctaaagacaatggctctttttctatcctattttggggatatctcctccccagtgtagctttcttttttatcagcatcatcagagaaagaaaatgaggcagcttgggaaagcacaggggacaggggagctctccaggagagctggctcttaggagtccctgtgcaagtctggcctgggacagagctaagtggcctctgcagtcatggaatcagcaacagggctgtattattaattccgaagcccttggtgctatctattgggtgcttttgattggactgccccaggttgaggcctttacccaaattgctttgccctctcatcactctgaaaagtagctggcatttctttttagtcgcactgggaggtgaagagaatgggatccgtcatcctgcgatcagaattcatgcttgctggttttgatctggggaaagttgcttgctcatcctttgcttcatttcttccctcctctgcagaatagggtgtgatacggggttggatccaggctagccagacctctaatcagctcgatgcccaagtcagggaggctatctctgattgcctctactcaccttgacttttctctgtagacctctttccttcccacgccagcacatggtgggatgggagcaaggagagagtttggactacgggctctgggaatacaaggatgttttctagtggccgaatggcggagctataccaagtgggaggacacattggctggcaagttcctgttgaatgtttcccagaacatatttaaggaaatggctacctactttcccaaaattatttgggctttggtgtgggtctggaataaaatcatagcctcccttccagttcagggtctcaataatcttggccaccctcagtctgacttgtcatttctgggaccaggcgacaggcaatcgaggcctcatcctctccagtgtaagcctactgtcacctttgcttatgggtaactgtctattttctttcctgcaatgagggatggggggagaaaagggctggagagtcattttaaatacctgcaagttgttttatgatctggtcatgagaagggttttgggatgccttccatcagcctcagttgatatctttccagctatgtttgccttgacatttgttccaagcccactagcttctcataatgcccctggagccatcccatatcctcagggcttggttaggagttcagcagggttgctgtcaccaccagaaaggcagccagcatatctgaggagccagggaccaactggcaagatagatagggaagagaactggggctttattcatttgttgtatgaacatgtatgtatttgtgtataagcatgtgtgcagtggtgtacatgcacatgtgtacacacctgtgtgtatgctagaggctgatgctgctcttcatttcattttttgagtgcctgctccttggcaagactgactgactggtgagccccaggcatccccatatttgcctcccgagtgctgggattacaggtgtatgtcaccacatctggctttttacatggctggaggggatctaatcttagctcatgtggcaaactctgattaagccatctctgcagctgctccaggacattattttaacatgcattttgactttgattttaccggggaattctatgaccaatgcacccaccagaagagatcttcctgccaccaaggggctctcttataacctgtccatgaatttcagtccagagattgcagcccatacccgaaacgaaggacaattgtatggacaatgtatacattgttttgccattgtttgaatgggtctctgtatgtggaactcaaactcaaataatgttggactataaacggaagatgagtggcgtgtaaggcaatgcattcgttaaagtttttttttttcttttgaagactgttatttggagaagaagactgttatttgggttttctttttttgcagctttttaaagtgtaaggacttggacaaagttatttgggtgtttatgaatattctagtgaaatagtatagaaaataagtgaccagcacattggttcaattttgccatagataggtggagatgccaggagtgtgctaatgacaaaacagctcttcagacaggttagacagacaggagccatggcctgtgggttcaggaaacatccctggtggtttggggtggtttttcaaggaagggtcatctagcatgcccgtggggaaggcagggtggcaggggatgtcagtggtgagggaaggaggtgaactgctcacagtggttgtagatgtggttttatttttcatatatttatggttattctcagggagagagagagagagagagagagagagagagagagagagagagagagagagagagagaggagagaatcttgatcttaggggcaaagaaacccacattcttaggaatgaatggaattgtttttttaaatttcatttttcttgaaggggcattaaaaatgaactcccagtctcactaaggtcattcttgtgaaagtgaacctgcctgctggccagagctgaccgaagaaacaccgagaaccgcttgtaagtttgtcctggactctgcccctccatccccttctaaatgcagcttttaggatttgctgataaatagcagggcttgttttggtttatacaacatgtttcccctttcagaacaggcagattaactcccctaatagacacaagtcagaagctgacgtcaatacaatacaatattaataaaacacaatacaggtgagtgaatcactattatcctgagaggtaacacttatattttagacatgatatatatacatgttaccatttacatacattaagtgcacataaataaaatattatacacacattacagcctgtatgtgtccgtataaatacatgcagatatgtaacattcaaacaccacactacgttaatatatgtggatgtatctcggaatttacataggaagacagatttatctaaatattcttgggattcttatttatttgctgctttatgtgtgtgtctgtgtctgggcacgtgtatactcatgtgtgtatatgttgtgtgagtgcctgtgcatttacaactggatctcagaagagagtgtcagggtcttttttaatcactcactacttatttctttgagtgaaggtttcttcaggaacataggacttctgcccaggctaggctgggctagagcaaactctagcaattttgtctccatctccccttggagctggattactgtttttttttactgtttttttgcctggcatcttagggtactggagtctgaactccagcctggttgtggagcaagctctaccaacagatgagccatctctttagtctgttatttaaacattttaaggaagcagctcatgccagcagctattgggtttggcaggcctgatgcccaagaagtatgagcttgcagacttgagtctgaggacaaacgggacacactttcttccttctccagggacctcagggcattctcttatgccttctgctgactgagtgactcccactacactatagagggcaatctactcaaatgttacttatttaaaggccaataatatttaaaaattacccttttattgctgtctagactggtgtttgacagtcactgggcactacaccctagccatgtgacacataccattgacaatcatgctggacaagggtcagtcagtgcctccctttacatacaaaactttagagttcaggacccacttataatctccaggcttcagatgagagaagttggagaggggtgaaggtttccccccctctcatcttcagcctcatctgtggtaggtagtaagagaagagttctcctctgctcttcttttgatctctccctctttccttgaatattttttgacatttcccaccattccactttccttgttctctttgaaactccccctaattgcacactggcattccaaaattaatattccagctgccttatcttttatgcctgtttttctctgtcttctggtataatgttacttctggaaggatgtctacttattatctcattctttctttgaatattctgttcccactgtcataagcatttcctccaatatccaagggctgtctcttgtttgccaaatgcttctttttatacaatatcttgttttctaataagcacaacattattttattatcttgctgagatagtaataatagtgccggggcttccttttttcctcttctgtatttttttttagcttcaagctacaggttgagtttgaatgtttttcatgtgcccttggcctgggtctggactaaaagtgtaatggactcctgaagcatgatgttctcatggaggaccactagccaaagtgatctgaagaccaagtctcctgagcacattgaagacattggcacatgtcacatcttctcagtttccatcagccagagaatgatggggccaagttcaagtcaggagtaggattgtgcctgtcctggttcacttctctgttgctgtgttaaacaccagaacaaagcaacttatgggaggaaagggtttatttggtttctacccccaggtcgcagtccagcactgaggaaagtcagggcaaggattccagcagggactgatgcagaggcacggagaatgctgctcacttcttgactccaggaatgatgctgtctacagtgggatgagccctctgtattaatcaacaggtaagaccgttcttctcagagatggccataggccaatctagcctggccaatccccaaattgagactcccttagatgactgaggatgcatcagattgtagctgaagctaactaggacacacacacacacacacacacacacacacacacacacacacacatacacacacaaccacacactgtcacacactcagagtcatgtgtgcatgcactcacacatatgccatacatagttaaatacacatggtgtcacacacacacactgtcacacacatgctgtcacacataggtgtggttcacaaagcatacatacccataggcacacacgtctgtgcctttacttttaaggattaaaaaggcatatatctggcagatttgggccttgaataatgacttatttatatcatttgtgaaagaaccaaagagaataacaatgtttacatttgaaatccatggtggtagtggtgagttttattcttattctacaaaagatttattttttatgtgtgtctgtctatgtgcatacatatgcacatgcgtgcgggtacccatggaggcatgaagagggttttgggtccctgaagctggcattataggtggttgtgagttgctgatggtgctgggcagtgaactcagggtctcggcaagagcagtgcacactcttaaacactgagccatccctgtagccctcagatctcattctttgccagaaatcaggaaatggaacagttgggcatgccttctcattgctgatcacatacactatgttttgctttccttttggaattcagcttctgctcagtgggctcctgacccactgttctgtagctctgttcattgaatttactcaagagtcactttcattgctgggtattgctgtcttccttcaaaaaacatgaacagaagccaatgaacacatttagggaagaagtcctactagggctattataggtggcatggtgggtagatcccaagccagttgtttgcctctggaggtctcattggaaagcttggcctggatcacacatggaaacacggctagtggtctcaccccctccttagccacctagtcactgcgtgctttggcaccatgttctagcttctgggcagaggtccataggatggcatggttgtgttttgtaggttaggaatggcatgtgtgtggtgggaagcttttgcattcttcaaaaaacctacatgggcaatcccactgattttaattttatgaaatcttgatggaaacaaggtactctgtgtctcatcttggaataaagattccagaattacatggcttatagtttggattctacttaaaaaatgtaaaactttaaaaaagtacatcttgcaagcatttctgtcagcagaaatgtttctctctgtgtgtggtataaaactgttggtaccatgctatggctttgagctcttgggaagaaaaagtagccccccaacacaggaacacacaaacacacacacacacacacacacacacacacacacacacacacacacagagagacagacaccatgtacacacacacacacacacacacacacacacacacacacacacacacgtatgtgtacacacacagggaggagagaggggggggagagagagggaaagagagagattgattcctgctttgtgggttaagggaacataccagagtttatgagtgctggaatttaattctaggaaaccttgtcctctggcatctacaaatacagcctctggaatttattatgtgccctcaatgtgtctctgacccgcccttttccctgtttccacagtcactcttaatattagctgccatcgactcacacctgtattatacacacagcccagtcccttgtctctctggctccaaacaatcacctcctgtttcagcatccatcctggatgacagcagaagatgaagccatcgctcttcctatgtcacccccttccccacctgttaaaggactcaattgcagtcactcaaaggacactggccacataccatttcagtcctttgaagggtaaaagcgaactaagtatatttatcagtttcgtttggagagacaccaagacatgcagactcctcacactctggctcaggaagccatagtatacatttgtgtatgatgtctattgttgctatattctgaaaataactttaaggctgtaaattaatctctattaatgttacttgaagatgaaattgtcctcaaacttacctaacaaatagggcaactttaaaatatttacagattcttattagaaatcagaagtatgcccaccctttcttccccctccctccatttcttcattgcttctttttttctgtctgtctgtctgtctgtctgtctgtctgtctttctgtctgtctgtctttctgtctgtctgtctttattgtttgctgctaatattccctttcttgagctggatgctggatatcttgaaatatgaatgatgaatatcccacataatatgtagtattaccatcttttatgttttagttattatattattctccaaatattctccagcactccaaaatatttctattgacttacttcagtcatgcttatggtgaccatggtaattacaccccaatacagtatttctataattatatttaagcatactggacccttgatactatatttagcaaggtgaattcctcctctccttatataatatatagaatatatattatttgtgacaaggtctcactgtgtagcttatgacggtatcagattcataattcgcctgctttagggccctgagaactgggtttacagctaagcataaataggcctgacttttcctccctcaaatgttaataaacagatgaggaaaggcattggaaagaggctgatatagttagaagtagtcagagcctagttcagggaactctgggccactggggtttgcttcccgcattctgaggccatatcaatactaaagaagtgaaagagaaaaatgaccacggacacagggctcagctcctaatacacaaccaatacacaccagacagagaaatgagtttgggagatgctcttaatgatgctattacatggtctctatttcttatgaaccctgaatgtagtttcttcagtaggattttattagataaaagatggatccaaacattgctttaagtaaaaggcaataacttggtcatcaaataaagtaattgttctagtaggttttctatgactgagtttttgagccggaaaatggtgttttcaggggcgagagatctctctgtagtcttaagaaagcacaggctctcctctgagtgcttatagtcttgaaaccaggactcaggggtgaaatgaacaggcattaatcaagcagaaaccgtagttttatccacatccagcttgcagatgcaaataagaagcattttcccccaaacccatggcaggtgtctttatgtgtaagcatccaggcctggtgtgtacacagctaagctccagggccacaccatgttggttcgagttacaggggaaccaaagaaggctccatgggggaatgtgtggagaatggtgcgtgacattttggttcaaggaaaccagagattagagacatcatcctggctggaaagggtaacttccaggaagacgttggtacttgacatggtcttgaaggatggtgatgatgggagaagggaaaggcatgaatgccaggatgtgcagtgcgattatggagatgttgcctggaaagaagcactgaaatggggtcttcaaggttggtagatctgactaggtagctaggttgcagattcccaatggggctagaatgttatgaagttcttgaagtcctaggtggaaataagaattggattaagacagagcagggacactagaaagagatctgtttattgagaggcattgatttgaaaaaaaatcaatgaattgatgattgcaacataggaggctagaagacgatgagggttttgtttgtttgtttgtttttatgaacagaataacacagaataccagctactttcaaaacagttgcttgggcagcaataattggagccctcgttttcacttatgtgtgtctgtctatgtgaggaaatgctccctctctctctgtctctgtgtgtgcatgcgtgtgtgtgtgtgtgtgtgtgtgtgtgtgtgtgtgtgtgtgtgtgtacatgcacatgtgtgtagaagctagaagagggtgttggatccccaggaaccacaggcgttgtgagtcactggatgtggatgctgagacccaaactcaggtcctctggaaaaagtgatcttaactactgaaccatcatctccccagcccctcatttcatttatctttctttattcattacactgacagccatttcactctattcataaatgaccacaataaggagatctttgccatttgtatatccagtatatagtaatgcaacgttatgtgtttatgaaggttttacttaaaaaaaaatcattgttggatattcctcccttgtttagccaaactctgtgttgagtactcagcacctcccagggttgaatctgtggctaccaggttgtgtcacacacaggctagccccacattatctctgtgtatgttcaggaagatgctgccatatggaacattctggcagagaataagtcagcaaacagctcggcagcaggaaggctctgtggaagaaactggattgcactttaaaaattaccttttgtaaaaaataaaaacatagctgagtgatgtcccagtgggcaaagcatttgcttctcaagcataaggtcgacccaggttcagatctccagcacccaggcaaagctggtgcatatggtcgttctcatctggaaggccatcacttccgaagcaagatgggaggagacagggaaagcccctgaggcccctgggtcaatgcccgaggttgtccttcaaccttcatacatgtgcccatgctcaagtgagcatgtacacaagtgtgtatgtgggcacgcatacacacacacacacacacacacacacacagagagagagagagagagagagagagagagagagagagagagagagaaataaaaatacagcgttgtgtgaaaagacaaacttttaaataaaatttaaaaataaaaatgtaaaagatgatgagagtgtgagtctttggaagaaggcctgttaaggcatcatggatgtatcccccatatttcccctcacagctgcccctgtgggaagagtgatctgtgtttcttcactggccacagtgacttctcagtgatctgcctgtgtcctgtccaacagcatgatctcttatcaagcccttggtgcctcctaccctgccgtgtctagccagtggagtgcggacttctctgtagtgtccgcttaactttcgcgtgttctctacacaaagcctccgcccatcatcattgtcatgtctttaatattatttttatagcaccagaaacatttagagaatatctttagcacagaaacagctgaacacccagcgtaaggcacacagatccaaacacatctctccaaagacgcctttgccgtttttctttcttcaggtgaaaaatgaggattgtagtgtaaccctgacttagcagatgtgacgatgtctaatgaatggattgctctaaagcgggaacagaacgtatgaggtgctaaacaatactgtgcaagtggagattaaacctgaccaagtgatttatgagacgggtctaacaagtgatatcattggccccagagagtagagctggattggtttataagatcacttgaacttgaaacaattgagttgtggatatttgctgttgttttaatgacagaggcccagtgtagctttcaggtttccaaactttgcaacatgacattcattaggcctccaactccatcaaaagcaaaggaggctgttaaaatatttggtgggtagagagagggaagtaaggagacgttagcaccggcctcttactgcctagcagttctgtggacatccttgatgctaggtatcgccccaggctgagtttcccttagtgatctctataacacagtttttccctctgtagtcactttaaactccacatgggaactccagccctgccaaagtctctctgtttctattgccatcaaaacccataaagattctgcagtcaaagcagggctgtcttcaacatttcacagaatagaatgtcaaatatatagtctgttaatagctatggtattaatatgtccaatttaaaagttagaagttggggctggagagcaggcttagcagttatgaagactttctgccctgctagaggacctgggttcggttcccagcacctgtgtagagtctcacaggtgtttgtgactctggctgcaggagatctggcatcttgtctggcatcctcgagatgcacttacatgagtaggcaactcactcacacacagtaaaagaaagcaaataactcaaagcattttttttaaaaaaagatcacatgttacttgttcacggcacaagccagatgggcacagatcaccagtccagctatgagctcactgggatggagctgagttttctgagtcagttcagctcagcagtcagtctcagcatgagccatgagtgcttctctctcacagaatcccgggacactcggctggtgatctgcttatgcatttgattgtggttcaaatcagaaaaagctaagatcccatgacttgaaaacccaaacagattataaacaataaataataacttgtgttcagaagtgattgattagaactgagaaactgactagttgctgatattaactacatagggaataatttgttttgtttcctacagaatccacaggttttgttttctggctgaaatagctagggagtgagtcatagtttgcagcgatgcagaaattcatcatccccgaagctctttgccacgctcccctcccagattactcacggtgatccataaagtgtggctgtattgtcacatgaagataacctggcctccagagccacacggtactagggaaggaccgtggcttctgtgcttgagggttatgccatctagcccagatatttaagctccatgaacttcagtaatttctctgtgtatgttaacagggctcggcatgattgagcctagatccctgcgaaccatgtaaagtgggatttggtagaacttgtccaacatctcagtgctccagtgcaagagaggagacagagacaggatggttcatgggaactctctggctagctagcctggtgtatgcaccagaacaagaacattcctgcctcaaataaggtgggaggtgagggctgactcctggggaggaaccgaccttcacatgcatactgtggcacgtgtgtgcctatacccacatgcacacacatccacatgcatgcacatacacactcacacgcacacacatatgtatatacacatgcatggacacacacacacacacacactcacacgcacacacatatgtatatacacatgcatggacacacacacacacacacacacacacacacacacacacacacacgggattagaaggaaaacaaaagacaacaactgctatttgtgaccgcaatagaaagtagctgacaggaagcatctggttagacacaaagcctctccattcatcgaaaataatcatcatggctgctattattgttcttgatataacttggagaggattctgagtgtagaacagagattgaggggccaggggcatagcacagtgctagacttcatggctagcatgcatgaagccctgggtttgatccccaccccatccccccaaaaaaaattaaaaaaggaaatatttaagtgacttactctgggccattattttgactcagagtcaaaataagagctctgagatcctcactggctgctctgcctgaggtacgcatggcttgaccatgtgctcttggatgtaccagctggagtgaggaagctggccttagtcaacctcaccggccatgtgcattgctaatttatcttatacacaccgcttcattgctgtgccagaactttaacagggctttggactttcctttaatttccactttactacaaagtgttacaaagactcacttggacctggcgcttcagaggcaacatttaatgtgtgtctgattattagataatgactgattatgcctagtatataattgcctgtgttagacgatagcctgctgcatggttatgactgccaagaccttctcaggctgctgagttccaactagctaggcatcaccctgggattagctgtcatatcatctggaaattgagtaacatcatgtggcagtaatttactatatttcagttttttacacaaaaaagtttatgttactctagcattccctgagatcaaattttaggactcttaagaagctagaaaaggtgataaatacctgtggttattgtcttgttcccagcggggagaacactttacacagttgtagacgcacatggagagaggtggtatattttcttccattatgaaagctattggtttggatccataaacatttggacttgcttctctggatagctaaactcagacagagcatggttttatctactcatttaggtgaaaacaccaagaaatgattctattctttccagaaactcacctcatagaatttatatttttactataagcagcttgtttttaagactttttggatgttttcttttacttttgagatgggttttactgggctgctcagatgaccctgaactcctgagttcaagtcatcctcctgcctcagcttcctgagtagcctggactcagatgttttctaccagttgtcttagttacttgtgttgttgtaataaaacactctggcaagatccatttagaggacggaagggtatattttggcttgcaacttgagggcttggtctgtcatggtggggacatcacagtggcaggggtgtgaggtcacacggcacccacagtctgagagtaatgaacgctcagtccactttttccttcttattcagtccaggatcctggcccatggaatgttataaccctgttaggatggttctcagttcaatcagcctaatcaagaccatcaagatacctcaccccacaaccacaagctcctctttggtaagtctggttaccagcaagctggcaatcaatattaaccttcaccccaactttcacagttttcataaacattattttttccctctgatatttttctgttttctcttaagaggtttgatgttattttcttgttaagtgtgctattgttaaatacatttaattaagtgatttgttcatttaatgtagccaccatgctgtggtgcactggtgaggttgtgaaaggtgatttcagagtacctacattactatcctatttgatgtccctgggcagacccagagaaggttaagtggagctgtctctgcagattgctttgtgccagctccaacctgccacaaccttgggtgtcacactctctaggaaatcacacgtgtctatcttagcaccaaatgaaggcgagaaatgttcagccaagctgccaaaaaagttaaactgatttgattcttctttattttaatcaagtaagaaattagagttctaatggatggaagtagtgagaaaaggcttgatattgcagctagttttacacagcctatctctgcgagcaacacagatgactcttgttgaaatttgaataatgaaacataattagctcatccttttcaagcatgtgactgactggaaacatagaaatgacactgtacattttcttccttatatgcaaactgttggccagtgagcactgatggtgttgataggtttagagctgttgtgtgggaaccagagtcatgcagctcacctaagtacatcttcacaactggaaagaacattctactcaagtttaagggttgagttttggaatcctacatcctgctgtgcagctagagtttgcatctataggccaaaagtcatgtaatgtcccaagggaaatagctaacggaagatgatggattagcataatccagccccactcctggaaaaaaatttcaaggattaaaccctatggatgagaggtcagcatggttttcatagtcacatgtatacattcatatattttaattttgtcttttcttccataatctggtactgaaaattcattttagaaaatatgtttagaacataaaaaacgcagggaaaaacaagaatccatcataatctcaccatcaagaacttatttccttacttttggcaccgttccattgtattttcttaaaggcatttgaacgagtcgttgaactcatctacagatttttatttttgaattttatttgcagtgaacatcatccccaaactatttcctcgtgtaataaaaatgaattctctctcaccctacccatcaggttcatcttcagtgggtccctcatcttcctacaccacctctaattttaggcattggaatgcctctttcttttgttataaacagtgctacaggaagtctcttatagatgtctgggtggtgctgttgactccttagggggtagttctaactcaccttccgcagaggggctccagctctcagcaacattgcatacaggattacaatgtttgggcctggctcactccataggctgaaacattgtataattttaatttgccttaagagtactagcgaggctgtatgtttttgtcattcttttgctatgagtgatctgctcatctttttgtctgttgagcacttggtgtttggacatagctttaatggatttgttctttgacaatctcacacacatatgtagtccattttggtttctagagtctctagttcttatcttcctctcatccctgagcgtgatgagttctgcacatgtgacagtacatgttcatcccccatatgcaaagcacacactcccctcaatttattgtgctttaaaatcgcagccggcatattcttatgatatatgaaagtgacaatgcttattaaggtcagctctatttatggttcccctttgtactgtctaccctcggatttgagggtaacaagtccctcttcctctcagatcaaatactgacatgccttcttttgccttttctattttcacttctaaagaatatttaattcctcattctgtttgatctcaactgaagttcggagatacaatttggggatatagatcattccaattaatctctagcaaattatcccaagaccaattatagaatatttttattttccattcatttgggaaatgccagttttttctgtaacctcatagtaaagattgttctgaaattttgattttgttccttctttcagtctagatttgtgttgacactgctttcattttaagaactttaattgccattctctccattgtcacctgcatttgaaaattgggtgacctaatggtcagtttttccaaatgactttaaaatcaactaaaaaaaatggcaacatgttgtgttttgattttgattcctgttgagattatcgattagttttgagaaaactatcatcctgacacccattttagcataaatgttagtaaagtggattaaaacccaatggtaaaggaatctaagttgagaggtggaaggagcccagagcattttagaacagatttgtcaaactgagctctgatggaactcactaattcacatttgccagccacagtgtggagcaagcaagccttgggcgatggatgatcaggggactgtgattattgataccttttagaacattaaaacttgtgcattttaaaagttagattatcgagatgcctaaagcacaaagtccccacatacacacacacaccagggaccagactctgcaaacacccagtgattttcatttcctttaacgtagaaatttataaactgtactcattctccatctcatcctttggagaatcaaattgttcaattttattttcccttcccgttgcagtcacagttcacttacaaagccccaaacgttttaatactgcaaagaatgccttagattttataagcaggaggtctgtcaagcaaattgcccttggcagaaaagcagatcatatatcttgggcttatctacctcttcagactgcacacagcctggattgccctagggtgcacaccgggctctgcagaccgcccccgtgctgtctaggctggggcctcctggcccagggctgttgaggagggccagccctgtgcagcctgtggtttaggaagctcagctcctccccaccagtgatgactttctgctgtgatttccaaactgcctactactgtttatttggaatctaaacatctgggaagctttaaagacccaatttgttgagggcacagtctgtgctctgatttaatgtgcacgagtcacataacatgtaaacacgttgatagcgggatttattaaaatgtaactattgcaatataatctgggaccaggagacttagctcagtttcctgtggtaccctgtgtgatggagtttgagtttggtgagaaatgaagatgctcctggtgtaaccctggccttttgcaaatgaagagctggagtcagaggaagtttgcttttccatgccatgtactagctgggcacagaaggggactcactttgtagcttttgatgtctctcttgctgcatagacacagcactttgctaagggaagacacggaggtgatacagtggtgagagagtgctggaaaagcctggttcatgggtgtggtgtctcagccactctggaagctggggcaggagggccacaaagatgaggacaggctggacaagcaattcaggggcatctattttcaaagcaaaatgaatagataattagtcatcaatcaatcaatcagtaagggctggggatatgaggaagtgtcagttagtggttaaagaacttggctcccatatatgaggcctgagttgaatcttcagtcctgggggaaaataaagagtgagctggtcagcctaggtctaaaaaagtcatagtggcagctaaagatgctaaaaacatgaggagctgtcagtcacgaagcccagcttctggatgtctgagagaagcagatgctaaagcacgtggggaaacccttccgcatttcctcttaggttttggatatcatcttttgggtttgttggaaagtattggctagaaacgaatgcttttatttaggctcccaaaggaaacaccagctcttggagatattgttggctccaatatatgaacgttgggcttcattcatttcctccatctcactgatcagttccacagatatgttgttattaaaatgggacaaacaagacttggccaaaatctctgtctgatttttctagaatcttctcattctggtctggcttctgctgcaagcttaacttcaacaacttcagttcctgctcatctttgacagggaccctggatctgactaactgaattctaactttttagagtctcctaaatgtggctagttttggcttctgtaggtttttgcccaggttgtcccttttcttggaacacaagtcaaacaaacaccgtattctcacagatggcttctgtcttctctcttccagacttctttagggctttcacagccctgtctaccatatatggattcttgtatcatttggacttggttcccaactgaattgtgagcccagggaaggtgataagggtgaggtttccctcctgagtagtcacaagactaataggctataaacggggcatgaaaataagctgaaaaagaaaatgtcagtcagatccagggagggagagagtcaagctaagatattggtttcagctcttgtcacagacaggttcatcatggctccctcagtgttcattcttgaattttcatcaccacaaataagggcagccttaggttttcccagcttctctcgccgtatttcatgatttctttctcttgagtgacctcacttctcttacagtcatggagaactttgcttgatatatatgtatatcgctatctacacgtctagctttcagtatctatgatttctcccacaaattgtcccaggtatttactttcaagatctataatgatgattgtgaaaataataaattaggcagacaggtggagctgagtaaaatgtctgcctgaggcaaagtagaaatgtctcttctcaaagcctgtaattcctaatgacatctctctatcgtaacttgtcatctctcattgtcaagcattgggactgtgctcccgtctcccattggtctgtgagctctgctttacatatttccatatgtggcattaataacacactgtctcatatacagtaaagccacagtaaccgtaagatattaaatttgatgttttcctaaacagcttataataagtgagattagttttaccctttaagtctctctctctctctcctctctctgtctctctctctctctgtgtattatatgggtatgtgaacatgtctgtgtgggtctccttgcacatgtatgtgggagaacagagtttgacttatgtaagccttcttagattgctctccatcttgtgagacaatgcttctttattttgttatttaatctttgagaatttcatagaatttatttttatcatattctttcctgttccctaactcctcctagatcctcaaccctccttgaactttttgttattttttccctctcaaaaagaaaaacaaacgaccaccaacaaaacaaacaaacaaaaaagagttattaaaaaacatggagtttgatttgtgttggccaatacttctgagaagggaccttccctggagtgtgcctgatataaccaatgccacttcactgaagaacaccgcttttctctgtcccagcagctgttgttgtgaaggggtgggacttggtgtccatttcccctcctttgtgtggagattctgtgtgacttgaacctgtgaaggtcctgtgtatgcatgcaaacatacatacatacatgcatacacacatacatacatgcacacatacagacacacctacatacatacatatacatacatacacacataatacatacatacatgcatacacacatacagacatacacatacatacacacatacagacatacacatacatacacacatacagacatacacatacatacatacacacacatacatgcatacatgcatacacacatacatgcatacacacatacatacatacatacatacatacatgcatacatacacacatacatacacacatacatacatgcatacacacatacatacacacacatacacacatacacacatacagacatacacatacatacacacatacatacacacatacatacatgcatacatgcgtgcatgcaaacatgcatacatacattacatacatgctgtctctgtgagttcacatgtgcatttgccttgctacttagggaaaacacagtttccttaaaactgttcaccgtttcttactcttacaatctttttgtccctcagacactgtccctctctgaaaactcagcgtctgtgtcaaagatgaggcagtgtcttttactgaacctgagcttactgtttaggatagacagtggccagtgagtttccaggatttgcctatctctgccttcccagtgatggggttagggttgcctggctggtgccatgctcctgcaacaaagtactctgttcacgcatccatctcccaaagcccacccttaatttttcactgatattttttctttagcattagataaaatgatattctaggtactcagacaatacagtggcatccctgtcctctaccttacacttctaaatttcctttgcttgttaccccaaattggtgtttgctcagagtgtgggactgtgggcctctgtactttctatttaaggtgacatgtgacaattttcttctatggggaaaggtatgatttttgaaactgtggtttgctgaagctggtgaaatgcgttggttttgttgacaaattgtctgggtctaaactgctgacatttctcagccttctggagattgcacaacattatgcaactttatgtggaaacaaatgagtttattagtgatgagtgtgtgtttgtggctacatccgtgtgtgataatagacatcttttgtgggcacttacagcaataatgacaccactgtttttcagttcaccctttaccataaactatgtcattattcatctcggtgggggcatgtaacctcaaagaatgttacgagagtggtttgttgaaaaggagtaatggacggtgggctctgagtaagcctctactggcagggctctgcgatatctgagcacagggttgctctcccatgttggtggtctgcgatatttctattttaaactgttcacatccaacacagctttgcccttcagatccaggagtttccagtgactaactatagcagactgttttctggagtctaccttagtcactcttggggtcatcttgagcttcaaggagtgtctggggtgagggatagtagctgcttctcagggtacacagtctgacatttaactatagaagtacctagctcaccccacaaatgtcaggaactctgaaagttgttgaaagcaaagtagagttgagctgagcaatggctggaatgactgtgctgggtgtggggagatgggccctggcctagcaaatggaaagactagtagatacttagaaaggagtggacagtgcattttagttgacttggctcatatatgaagttaaggaggaaggagcaaagggctgtggtaaaggaagggaaacgaaaccctgagataagcagtccagctaaaattcccccagggggaaatgacaatgtctccacatcactccagagttttaggtgacacccccttgcccccgccaagtgaccaagccaacggacactggctagatagatggtagacaaaggtgggtagaaactggccctactccaaagatcctcaggcagccagaggcaagctgaggcatcatttgagctgcttggagacacgcttccttcaggtgaagtctggaactccaggttcaccctggtctagtgcagggcagcaggcggtgtggaccctggaagagcgtagatgggaggagccacaaagctcacaccttagggaagcctccatgtacagcgagggagggagtgtggagcttgtgagaagtttcccagggggtggggttgcttctatgggtgatgggagttggaaggaggggaccaacccaaggcagttttagagtaaactttccagcatgaggaagggtcatgggagggcaatggcagctagttttaagagtctgttcatatgagaggctccaaggtcctgacagggtagtgcagtagaattaggaggggtaggtgcttttcatgggaacttctgaggatctgagagctgtgaagacatggatcaaccgtgagatggagggaaaggaaccacaagcctgatggctttgatggctgagtttacactgcccgcagctcacttggggtgtcacaagctgagttcaaggggcccctaagacatctacagaggcctagatggcagatccactcaataccttcacctgtggtttggactattagtagaccggggacctcagctctgttccccatgacatcccttactggtactcactgacaaggggttgaaccacgtaacgtctacttgctctgcaggatcaatctagagatgacataaaagatcatgggacaatgtctccttatagggtgacatctctcccttcttggccatttccaagggcatggggttgatgataatgggactctggcccagggttcctctctctgtaaattctaacagagcagacacctccacaccaacaggggtgactcagtatttcctaggacttgtgggtttaacattgagtcaacattattctaacaccttttaatgctcttcatatttactgcagacagtaagtggcagacagtaggacagaaccacaatgggctccaatgtcagcagagctctttctcagggctctaagaaagccacagtgagatctctccctcctggtagctataagaaagtacttgaagtgtgttggcattgttaccagtttctattaaaaatagaaggaataataaattcatggtgaacatctttaggaagatgtgggctctagtcctgcaagtgtgaaagtcaagagaagatgaaacaacacccccctccatacatacttctccccctaaaaggaaaacaacaacaaaggcccaattgccatgagccactgtgactcagaggtcaccaacgggaagaaacaaataaattagaggaaagttcctcaaggttcctgaaagtgattagcattatttcctgttggtgtcccgaaagagctgacagtggctcaagggaacctctgttggtctagaagaatcctaaaatgtcatgtggatttttttttttttttaatggtagaaaaaccaagcaggggcaaaactagaagggaaagctcccctcccccctctttttaatataattttcagtagcacaatacgttaaagtaaggcatattttcttcatagtaatacagcttcaggacatgatttagatggaaaatttaagtaagattaatgcaatttattatccgacaggatatccctacaaaccacactatttggctgaattttagattcccaatctaatatttcagatgagatttccagatgggtgtcttattcctctattagtttagtcagggtgatggagagtttgtaaaacaggggaggttaaactagttttaacacttgattaatcattgaaattacgttgttactgctccagtccactggctgttgtttattaaggagctctgtaagacccaaagccaacacaaactgcgggcacgtttccaaccaggctaatttatttgatgacttcttcaaagggatatatgtttttttaagtagtaaatttatgactacattgaaaggctgttcaaagcttgctgtttgcttttcaaaatactcaagtgtgggattgtagtacttaaaggtacacacccccccacacaccccaaacaaacaacaacaacaacaacaaaaccaacgaaagacactaaattctaatttcctggaacattattggacagataaatgtttaaaaacaaattgtatgataaattgtcagagctgttgctacttctgcctagggacaacatgaaactcggaggtgacaaaccacactcaggctctgccatcttaaaagccactggccggtcaatcacgggaagtgaacaccagtgtacccagtgtgcccagtgaggctgggcgcaaaaaactatgagcagggggaggaggcacaaataagctccggctggatgcagagttgcgcatgcgtacagagggagggttgagcgcagacacccaacggggctccaaaccagagcttcttttgtggacatgaaaatttcctgaggtctgggcttggtaagttgattacaatctcttctcagagacctatcaggaacaaacgagtgagttgcagacataaatatgaattccagagcccaactcataaatgaattcctaaatgctgaccgagccagaaccgagcattggaaaaccacttggcaggaaccattagtttcaaaatgagatgaactgctctatttagctctcattgaaaactttacagaaacgccagatttccataaacacaggtttccttgagtttgcaaggctttgattaactggtggacaagagtctcacaaacacagatttttgtgttatattcagcctggatggctttggaagctggaaaccaacacagagtagccccttgcctttctgggacgttaactcgtctctgatttccagaaggctccctttgttataaggaggttggagaattaagaattagtccagggtttaaaaacgtggttatagatcatattcctgtcatctgtgtcatcatctgttaggccttttatgactgattgacagcccgctgctttatggtttggctttaatgccccaaaggaatgagagaattaaaaaacacacttctgtctttactgagaaagtcataaagttgtggcttcgactaagtaaagagattgcttgcaagacatattttagtttttaaatgtgttttcatttttcttcttactgccatatttctccattgatcctggcacaccagacaagggtctctaaattctgtgtagcttacatcctcactaccaaaaaaaaaaaaaaaaacaatcaccctccccctcctcctctggcttccatgttcaagtcaataaaaacaaaataaatttgaagggtaaagagccagtttttctgtgttctgaaaagctgtttccttccaagcgagtgagtttgtgggccaggaatggcttgagttatgacatggattccgtggcctccataagcttcttccacatttaattctgtgctgacacttttccacgggcctttagatgacagagattatacaagaggagaagatgagttaagctggttgctgttttccttagaggggtggaagcttttggtgggaggactgaaaggtgtggagaggccagggacaaggcagcacggagtcctgacaacactcagacaagctggtgaatccctgagacagctcagtggactggggtgcttttggaacaaagagtgggacccccccccaaaaaaaaacttgtggtcctctctgtgcctgtaactctagcactatggaggggatggcagcagggggatttctgtgacttgttggctctatgctcagtaagagagatctgtctctaggggatatggtggaaagtgacagcaggacactcaacatccttctgtgacttctgaggacacaggaatatgcatttacatgccccaccccataatacacccaaaggggaggacgggggagggatggagggaaggcacttaccagcacacttggctttagttttaatctatttctggatagtagaaactcataggcttgtctgtatgaattcagtcttaccagagagttctcaaaaatgtcagctctggctacggcagtgacatagaagccatcttcagacagtcaagacatcagttttcctacagagcatctggcagcatgagcttcccccagggtcaggaagagcaggcattgccaggcgagaagagaagcatcccttagagctgtgttcgcaagtagagcctgaggagatgtcattctagagccatcagggcaactccatacagacagtgtagagtaagggtttccgagcagtgtcctggcaagagagtgagaaaaggacctgcctcccgcttgctcccatcctcctcctcttctgcctttatcaacaaactgtgaggttagtcagagtaagagcaatccaagcgaccctgggtttctttcaaacccctatctgtttattccctcttaggagaatcagttgtgggagtcacatttcaaaggcatcaggagagttctcagaagcagaccctgacctgtgcagtccagcatcggttgcaggcttatgagggctgctatgcagcgcagcgaggcatgcagggcagggttgagtggcagcttctcctgcgacggtggaggtccatccttgcagccttctctgacccctttctgaaggccccaccccacaaaagctcatcattccttcaagtggggatgagatgctcagaacagagagctttgtggaaggacagaagaagtgcagagactgagtgatgcgttgggatttgtattttgtcatagttactattctgttgctgtgaagagatacaataacccatgcaagttacaaaagaaatcgttttactagggccttgctttcagtttcagagggtgaggcatgactgttatggccggcaggcatggtgctggggcttacatcctattcacccacacctggcagaaagaaacctcaaagcttacccttagtgacacacttcctccagcaagccacacttcctccaaaaaggccacatctcctccaacaagccacacctctgctaacaaaccacacctctttcaagaaggccacacctccaagaaggccacacttcctcctaacccttcattgtatgtattcttccttcttgcttctagtctcactgactggttcattctttaacctaactctcattctcagtaattttaaaagcaattttggacttgaaaatttatctcatccagtactataacttcacacttgaaatgttcccttacttatttctgaacttggtactgagcttcacttgttagttgaggtcagcctgtttagacgttttgtcagatggattgagagcagattttggtccgtggttcatgtgagccaacttctgagccaagactttttttttttttaacatttttttttatttgaattggaaacaagattgttttacatgacaatcccagttcccttctccctcccatcctcccctaacaccctccagttaaaactctacccatcacacaccctttcttctaatcttaccctgactcaacttttctgctccctcatgacctctgcatccttcctcttcttcccttctcattctctagagccaatactcttttttgaggacactgaggtctctctactctgagaagagggccaactcctgcctctgtttctggtcttaggaccaagggcaatgtgcatgcatgtctaggccagtgctctctctcgcactcttctttgggccccttctctaggcactcagaccccttgaactttgcttggctgccccttgctgggacacgtctctagaaaccgcatggagagtgtcatggaacacttacggggtccaccttgtttgatttcctcccccctctgatgcttctactcggctgcatgctgacagccatcatttcttctatttccccttcctcactgttgaagtccatctgtcttctctgttactcctccatctcagaagcgtcagtcaatagtcttatcgtagctattacacctgtcactacatacagcactcacagtgtgtcttctcgccgattgattacatatcgatggagaccatgccctgtcctaggctctgtgttagttactgatgttcccaaattttctcacgtgcccctaagagctgcatgatatagtgatgaagagaatttatgtgtaggcaattacaaaaataagttctatcgagcttcttgatggcgatcagatcagttcttatccaagtgtgcctgcctctctgcaatgtgactttgctacctcccctccccccacccccacccccgcccttcatcaggactagtcatctgaggtggaaatgatatcttgtgaactgtgtagcccgagtctcaagagactctgggctttccactttcaccctcttggaatgttgatctgagacctccatgtaaggatagcagggtagctcaacacagcacttaaggtcacagaaaatagaaccaagtcccctgtctacagtcttcagaggtgactagcctaacagactccccaacagaccaagatatagaagtagtcctggagaagtctggcaggggacagtccatggtcaactcatctcattgtaaaacagaacaagtcattttcctcaagacatggagttttcaagctgtgtattacacagaaaagatggagagtaacaaatgcttcataccatcccttctggaaatttctatgctagctctaaccacaggaatggctgctatctgtgatgtttgagacacttgctttcagttcattcctgtgatggccaattccttatcacattgtatcacctgccctgtaatctacctgatctctcactgactaaaccaaacactcctcagggctgagatctgtttcttagctgtgtttcctagaggcaggagcggtagttaaaaatgtatttggtactgacatccattttattttatttattcaaaatctccctctctctttctctctctaagtgtgaatgtgttcccatatatgaatgtgaaaaaaacgtgggcctgtatgcattgtggtgcccactggaagtcatagggaaatgttggatgctgactcaaattttaaagttcatatttgattagcttattaggtatcctgggtacctttgactcaatggagcttggaaatgcaggaatcttacgaagttttaggaaacattgttattagtaaaattatttaaatgatttaagtgaccctgtgggggagttcagggttagtctcattttatagtagacgagatgcagagaaatgaaacccgggttcaaatacaggagttcatgagtaggagctggcatgaaagggcagatattcacccctcagaacagatcattttcggtagctgttgaggggcaggcaggtgagctgactgccaggcaatcttaggagtggggcctggaagccagctggagtgaagacaccaggggattctgttcttttagccttggagggaaatacgatacagagactatgagttagcacagggcagctgagactgaggggtgtgagaagacaccatgctcagacaaccggacgcctgccactcacagttagccttctccaggaggactaaagttggcccatagttctctgcttctgactctttgaccccttttcttactgggctccatggctcatctcagtgaagtacaagatcacccagtagaattctctccagggagatcatttggggtgaagaagaaaaatgggtggaagaatggtctatttttgacccagtgtcttggttgatcttggtgcaagtgcattatgagggtgaagtttctaggaccttctgggaaaaaagcaatttggatcagccccatggccattagaaggacataacattaaagtgacaggaaaatatatagacttggtcccttagggttttctttttagaaaggactctgggtcttttatggcacatgtggaaataaatctgtgaaaataataggaaaaccctggggaagaggaagtggtcacatatttccaaatctgaaaaattttgatgagtggctgctcagctaaattcaaataatgacatcattcaactaatggcaatgataatgttaatgatgttagcgataattaacccatcttcccacagaactttgtgccgagggcttatgaaatctcaagtttagtagtacaataagcatttatggctatgcattcatatatatgtgtcctcttgctcatagaattttcagttcagtggaaggagacacacttaaaaccattaagagaatattgcaaaatttgacaaggagaacaaaggaagaactagggggtagggttttgaaaaatcaacacactttatgtataccaggttagggaaaccaaaataggcttctctaaggaagcaatattttggacctgaacttaacattaatccttggaggtcaaagaaagcagatccagtagaaacaacctgggttggtgggaatgtaagaaaaggaagagatcttgagcacggggagataaagttctaataggactctgttcttgtttcctttctatcactgttttaaaacactctgaccaaaaacaactaaggggaggaaaaggttaggttcagatacaggtcacagtccctcattgagcaaaatcacggcaggaactcaagcaggaacttgaagcagaaaccatggcggaacaagcttgctggtttctctcagattcttatatggtcccaagctaccttcttagggactggaaccacccacagtgggctgtgccctcctacattaactgacaattaagagaaatccccataaaccaacctgaccaagggaattccccagttgaggctttccttctcaggtgactttaagctgtatcaagatgacagaaataaccaggacaaactctgaaaaggcttctatccccgaaagtagttacaagaagcgaggtcaccatcagctcacttgcttcttattgaaacccagtcagcaatagttcttcttatgtccccattcacactgggacttcgcagctctgacctgggtctgtttaggacaaacagggtgaaaggacaggcaaaatcactggttatggaggcagcttctgccattgctgccccaagttaaccttcctcgacactgccctgtacccaagtctaatggcattagtccaaccttcctattttctgtgaaacaaacctcgattctcaaacatttacaaatctgtcctccaggaaacattttatgaaacaccagagagaatggaggcaggctggactggcccagccccacagaccacaaattgggctggttctgcaatgcgtcactatcctccagggcccagagaccattgcaaaccactctccgagaacctaataattatcagttgtgcaaaaagtgtcaccattcttctggcagagtcctgatctctttggcatgggagtggagggttggcgggcggggggtggggtgcagtggcagtctgcagtgactcttagtgggaaccgactgagcatgtaattatatcatgagtcaagcactccccagggatgtaagatgaccagaggaaaatgaaataacattatatcccacatgaataaaggcactggtggggtaagctgactcccgagaaagaaaactggggcgaagacatttcccagcaattaagcgtcttatgacatgtccctgtgtcccctctcttaaaatgaagggattatgtgggcacgatttatgtctttgctttaagcgtggaggaacaagtgaccagagatgacaagccacatggatagatgacctcgatggcaaacaaaaagcctttgagctggaaaacttgccttgctgagttccaacagagcactgtttgttcaggaagaaatcaggctgacaaatgttgtggtgggagctaaaaaatatttttttcctggctaaaccgcttccaaaggtatatttttatgtacccaggaatagcagcctgtttgtcttgcttcggctccgtctccttgtttcttttttgaccaacagctaaagaattaggctctttgcactgggctgatggagtggctggaggggctcctgtaggtttgtgtccccccatttcccagatgataaaatcatcaggggggcttttgaccaaactctccagggaaaatcagttacaggcacctccagcaaggttacggggttagaggtatcatgggaagagtgacagcttcctatgctgttttctaaaaggagtttttaaagctgaacttattattattttttaaggcacatcttgctacgtagctgagactagcctggaacttgctatatagcccagggtggacatgacctcaccaacctcctgcctccacctcccaagcattgcatttacagatgtgtggtgcaatgcctaaaaacaaaataggattgttttagatagagaggtcaggaccaatataaggctccgagtgacgaagaataaataaatttggctatgtcccttccctcagtctctggcaaggaaagccagggtttggggataagggattatgtgtcaagggagaagcaaacagcagtgtcctgacacacgttcttggggaaagccagtaaagataaatactttgggttcatttttgatgtgttcagcattcagtgtgggcacggatttacttggggggagtaataaaatactgaagtaaaaagaggagaattatttgatgactgaaggttggttttatatccagtcctgaggggtaagactaagagggagctccctacccagcctcactctggaaaataagggtgaaggacacttgagatgaatatggatcccttgttaaaatccctgagaagatgtcactaattaagcctgtgtggcctgcctgccttcatgaggcttacgtatgtagttactatgaggcggttgaatgcacagtatggttaaaaaccaaagggcttgcaaaaaatattaaaagtacagttaactaaatggtaagtatacaggttataggttaagtattcattattcaaattgaaccatgaaatgcatttatgtctcatctataccttaatgcagttaataccatatttctagttcacctgcattgtgattgggacccatctcatgatacaaactgtggaattttctgctcatgatatcatgttgtttccaccaatgttttagattttggaacatctcaggttagatatgctcaacttacatactattcctttttttaaaatacttcatttacttattattactgtgcaatgtgtgatgtgtgtgtgtgtgcaaccacaggccactgtgtgtgaacagaagccagggtacagccccaggaactggtttcctctttccagcatgggcttcttggagatggcactgaggcagtcagtcttggtgtaatcactacttttacacactgagccattgcatcagctttgctgcttcttaatgaaaacattccagtaagacaatgactaacgtgcgtgctctcctgatctttgttccaacgaacactgagaaatccccatcgatggtgtaaccgttgggatgtgttaccataccccatctcttttgtggaccatagtgattttatcttcaccagtaataagaaattcagtcctctaaatcttgcggaaatctcttggttttcaaggtcatccacaatgatttctcctaagacaagatttcccccctcatacttcacattttcaaaacagattcatttaaagttgattagcacatgtgtttagctcagaagtgttcccactgtccccgtatagttgagaaatcaatgacttgatttgaccttgaaggagtaaggggaaagagaagcagcttctgaagtaagcagccacagcctgaaattttttgtcctctccttatatgccaaagttctaaaccccaggactcagaacatgactagttttgggtaaagtatttgaaaggaggtaaaatgaggttactaacatgacccctactcaaaagtggttggctcctcataagaagaaacatggaaagacacagatactctcagagggaaaattatgtgaagacacagagagaaattggccactgactagctaagaagagaaattatccatgcggacattagcttagactgtcataataacacaccacacaccgggtgacttatacaatagcaatttacttcttagggttctggaggcagagagcctacgatcaaaggaccagcagagagaccctgggagggccctcttccaggtgttgtgagccttgcttcctcccatgtctgtacccagtggagatggtctcaacctcttacagtggccaatctgattctaaaggctccttctcactttgcaccctatttaaactgaatttcccaaaggccttagttccttagcatcccactgtgaattagggcttccatgtatggcttcagcatggagggaagcattcagtctatgtcacattatggtcttcagaatggtgagcaagttcatttctgttgtctaagccacctttgttaggtagctcaaaagaactgctgcagcttgtcatggattccaagtgagagtgacttgtgggcaatgacaccagtgtgcaaaagcctacactaaagggagatcgctgggaactttcttattccttatttggtgttataacagaaatgcccaagactggatagtttataaagaatagaaatgaactttctcatagtcctgaaggctgggaagtccattattaagttatacagggctttttatcaaggatttgatcctgttcaccagggctttaccttcacagctttaccgtattttaaagaccctcctattaatcttaccacattggtgattaatgtgttctggggggtacataacattgaaacaaggagagaagttgaacaagtagcaagttgttaaaaggcagcctttctcagatgtcatatgtgttgacaaagaaaggcaccatctcccactgtgatgtggagatgactgtgggacagggtacctggatgaatgtccttggctttgcccttttctctgtcagtaaatatcaatcctcttatgaggcctctctatcaccacaacttaatactcgtgttctagtttccattctgttgccgtgatcaaacactctgaccagaaacagttgaggggaggaaagggttcaaatcagcttacaggctacagtctgtggtggttggaaagaaaatgacccccaaagggagtggcactattaggaggtgtctcgttgttgggataggcgtggccttgttggaggaagtgtgtcaccatcggggtggactttgaagtctcatatatgctcaagtcaagcccaggactcagtccacttcctgtgacctgcgtgtcaatatgtaggcttctctgcttcttctccagcaccatgtctgcctgtatgccaccatgtctcaccatggtgataatgggctaaacctctgaaaatgtaagacatcctaattaaatgtttcctttataagagtttccatggtcatggtgtttcttcacagcaatagaaattcctgctaagacacagcccatcatcaagggaggcggaagaggaattcaagcaggagtttgaagcagaaaccttactggctccttcaagttcatgcttcaatagcttccttacgcagaccagagccacagtgctgcagatggcattgcccacagcagattgggtactcccacattaattaacaaccaagacagacatgctcacaggccaatctggttgagacaattcctcaatgaagggttccctctcaaatgactctagtctatgtcaagttgacaattaaaactagctagagcattatgggttggttttcctttcctattttactggattccgtctgtttctagctaaagccagaagaatcagtaaattctatgaagcacagcacaaattggattaaccggggttataatcttagacaacgtcctttttacccatggtcctttcagattttcctcccttgaatattatcttttatacattgtggaagcattatttataggatctctgctaaagtgctttagatgctcttgattgaggagatgtggtagacgatcaaattcgtttgggtcacaagggaaagtgtccataggaaaaatgaatgggactctgaggaattgaagactgtagagaaaccagacctgacagcacagtctttcttttgccagttggatttggattgtgttattatatataagttgaaggaataggctagccagtctggacaaaagaaaaagtgaccagacccatttccaaaaccatgaattgatcaagaagagaggcagagagggagggaaggataattttctttgatgcaaaatacatattcttgaaatcatttcccttgaatgtcattgcttcttatcctagaggagatgcaaaattctggagttataaaaaataactgtctttagctactaatcatatatattttacacttgagtatcaatattatttcatttcatttaatgaagggtaaaagttttccccttgcttatagttgtaagatacataccacgtatgtacaccttgtcttctcatattctgttttacttctttgatcatttttttgtttaaaaataagtgtctatcattttattttctttctctcttttaaaatttgttctttgagaattttatgtagtgtgatttcatcatattcatccctcctcaacacctccaagatccaaccccttatctattcacccaactttgtacactctttgttttttttaaaaacccatccgatccaatttgtgctgtccgtgtaatctcagctatgtggtctctcactggatcagggctgacttaccagggactacactcttaaacttaactgactctccctctctagcagctctctgtttccagtagctcctgggccaggggtgggacttcatgtctacccctcctctatgtactgggcttgtctggcttgagtttgcataccctgttataactgctgtgagttcatacatgcttccctattgtatttggaagacattgcttccttgacatcacccgctgcctccggctctcacagttctatgttgtttcttccatacgatgctcaggtcttgggaggaaggtttgtgatgtagatgtctcaagctgctgaccagtatgcttacatgagacaatgctctcattcactgcaaatatttgtcaatcttattggtttagtaaaacactgattggccagtagccaggcaggaagtataggtggggttgcaagactaggagaattctgggaagaggaaaggcagaggagtcagcagccagattcagaggaagcaagatgagaatgccttactcaaggtaccaaaccacatggctaaacagagataagaatttaagttgtaagagctcattagtaataagcctgagcaataagccaaacagtatataattaatataagcctctgtttggggctgcaggactgggcaggacagaaacttgcttcaacagtctgcagtctcttatctctgtaccttgacctagtgagggtctctgttctaatcacacctactgaaaatagaaacttccctgaggatgttgaaagatcaattaatgcataggcataaggacaaattattagaatgataatagtagtttctcccctgtgacctgtgacctgtgaccattctaggtataggttcttagcctgatgaccatgcctggcttgggttttatcttgtggagcaagccttaacttcagtgaaaaactgcttgctcacaccagtgatgtccatgccactcttaaaccagtgggcatggtttactgagtcagtaattattgtagcttgcaggcatcatagctgggtaagactcacgatatttttcttcagcagtgtgcattatttatgtactacctgaggtaaggcctgtctcagaattcttctaaaacattaccttgcatctagttgccatgttcccttcatcccctcttggttgtaacagtttctcagatttcccctgcccctcattttcagcaatcctgacaactttgaggataactgactgtttgtactgtgtttctatatattttttttcctggtgtttttcttgtgattccactggagatgtaggttcctgagaggaagatcttagaggccttccttgtgcactttcctcacaccatacaaagtgcatatttttctccatgagccatcacagttgggtgggtgtctccaggatgtggggcacagtgtactccactctctgcagggaaatcactgtgtctgacacactgttcaggagtagggccttacactctttccactcaagggcagagtagccgaaattatttggaattctgtgaaggagagtgatttgtcttttgtatttatttatttatccattaatttaatcacttattttgtcagtatggagtcataattattttttgtagtgagtaatctactttatcctcaagctttgactattattagagtccattcagttgggtgctttgctactaagctgcctccatcagtatgtgtgtatatatacacgtgtacatgtatgtatgtgtgtgtgtatgtatgtatgtatgtatgtatgtatgtatgtatgtatgtatgcatgcacacacatacactttaagtttgtcttagtacatgtttactttctgatatcacaaaatgcttcaggacagtcttgtacatttcttatactagttcttgtatcagatggattatttttgttttgttttgtactttttatgcctgcaattacagaggactattggaaactaagattgtaatgcatgctgcactggtcaccactgggatggatgtctgtttctaggttcctctccactaacagagcaaggaatgttgatttcatggtccctggtttctatatataactatctatatgaatattaaattaagcacacgttcacagcagtactaattagaaacattccagttattttcttcatttatttggaaatctagttccatttttaaaaggttacttacattaaagtctactatctgtgctatgaaactcaatagggtttgaaaacactcacagtgctactctatcagggcttgtaagagtgggctgtaaaatgaaatgtaaaagaatacataaattctaaaaaagaataaagtaaaggaggttaccatgaagggacaaaaaaagagtgggcttgtttttcctaccacatgaagctactgtagcatgaaatctcccagcagatgctggtgccccatcttgggcttccagggcttcaaagccctgagcaattaacttattgaacttcgtgttttgcaagtccttcacgtaggttcccccttccatccctgtaatgaggaaggtaggtacaacgatctctggtattagactgttagtttaatcccacctcacccaccgacctctgtatggctttgggccagttgccttggtttcctcattaataaaacagccatcggattgtttctgtgtcagttggaggaatgcacctatttttatgtctatgtgatgggctagccccaggcatgaggtcaacactcagtgctcttgtgcaagcagtctttctgccctaccttgaacttgcccgtcttgtctgtagtggtgactttctctctccaatgcatcgttagctctcctgacatggatatgcagctgaagactaagggagagggttggttttctggtgagctttaaatcccaatctaagcttttgccatctaaatttaaatccaacctcagaattaccaagtccagtaaatgactgctcacagctaatacctccagggtgtggtatgagatgcccctttccagtttggcactcacttctctgataaactcctgccattacccacccatccacccttttcttaagcaaaatcatgttctttggccattgaatttcaaaataattacaacatttagtttgaaactctgcctagcagcctgtgggcagcaggcatgtttaaagaagactaataaatgaaggaaaacaaatgtacagggtgaaaaagtaaatggtgctaatcctatttggagaaaaaccccaaagtgactgcttatttacaagaacaagaataattttagaacagatctgtaatgtaagcaaagtaaacacagcaggactgtgctgtctacatcacctcgagctctctgttgcacgagaagagtctttcactcgcttctggtagattatgtgcctgaaccaaaagctgaggtaggtcagcatcgcttggcccactctcaggtgaacaaggctatcttgggacttccaggtaatttaatttcctgtttctagagaaatattatgcaatgagcctacccactgtgagggtcctcagtctcactgtaagctcttctgacatttgctccatgactgtcctgaggtaagccgagtagacttggctcctgcctgctctctctttagagtattagtggtacccaaagtagaagatcacaacatttcccaggtgcctgtggggtggggtgggtggggaggtggaggggtggaggggtggaggggtgggggagggtggccttccacttgggaggaggccaggaatgttggcacgtttacatttcagaacatcaactgtcaatgagaaacaggagtaggtggataagacaaggttggtgagaccatcctgacctgtgttttgaatgacatctcagagattcctgcttgcagtaggttgagccccagcttccacgagctgtagaccgttgccagcattctcttcccggtctcactcacccattggctcacagtgctccctcacacctcctcagctgcttgttgtcaaccagtcacttgcataaagatcctagaccctaacaagacagtaagattcagagacttcaaagattcatgcaaggtcacaccgcacttgaagggcagagggcattacaaacattctccgatgagattctaatgtagtttattgtgtcaaaggattgagcaatgaaggatcttaaaaccagtttcatttgattaaaaaaaaagaaatacatgttgtgttgaggaacaaaacacacttctgtctcttaagcttagatttgtttagcaaattctgaaagatacaggcaggagtacaaatctcaaagtgaaccggtacaggctggactgctcattaaaataagatgtgtgtgtgggggcggcgctggagagaagccttggggttaagagaactttggttattccagaggaccagagtttggttcttagtacccacacccagccttttataacacctataaccctagcaccaggggctccagcaccctcttctggtcttcttgagtaagtgcactcaggcacacacccagcttcctgcacatttgcataaataggaaaaaataaaaatctttcaaaaatgagatttgggggatcacaagtgacaaatgaaacgagattttagaaagattccaagtggtataaatccaaagatagtcacaacataaagatgattgctgcaaacaagaacaatgaagtatggcatgccaatttcaggacaaggacagggagttagggcagagccatttgagtttttaccgataagatttcttcaagaagctttcaatggttagaagttgataattacttaagattgaatgaagagttgctttgagatcccttagctcacagtgtcctcctgtctcagagctagacaccattgatacagtaggcaaactagaagtcaggaacattccaataaacacagatttactcagaagtcttagagacatgacaaaagttctgacacgtaaaagttctgacatgtaactctgtaatttagaaacagtgaaaaacagatctgacatttcccacagatgataaaaatcccccaaatggatcattactataaagtcattaagacatgattcattctctctctctctctctctctctctctctctctctctctctctctctctctctctctctctctctctctctctctctctctctctctgtgtgtgtgtgtgtgtgtgtgcactcgcataccactaaaggccagaagagggcatcaaatctctgggatttagagttacaggcagttttatgccatccaacgtgagtgcttagaactgaactcaggtcctctgcaagagcagcaagtaagtacttctaactgctgagccatttctccagccccaacaaacagccatttaactcttagaaacaggaattgttcaccgcagggggaccaagaagagtttattgtaacaaattgttacagtctgttgtgctgtgaagttttgattgccttagcagatgtgttaggggatgcttttggcaggacatgcccacttgtggtttcttatggcagactcttagaagttgttgatgggattttcacttaggtatgttacttgttgaacagtgctgtgtatgtgtgtgtgtgtgtgttgctcaagtgtgattttgtacacaagctgggttcaaatcctgacttctagatcctaagtgaatcattaaactaagttgtatgtgattttccctactaaatgggaagaaatttttttttcatattgttgtcttcatgggtagtgaaataaaacttgggaaaggagtataaattataatgcattaaataaattataattattagattttaaaagaaatcatttgagttttcaattctgagaaagtttgtcttaaaaatacagcatagtttttgcctttgggaggagttcattgctttgctaaatagtaattaaaatattcaacaacgattttcagatcaggtgcaacattaatggatctggctgttagtggaaacattgcctagatcctggcttgggagacttgtctagtaggcagattccgacctagtgtctgctttgcaaatgcatttttattgaagctcagtcaagtctacccactggcagattgttcctggttgcttccaagctcttaagatcagagtggagaaattgtaacacagaccgtatgacccacaaagtgaaaaaaaagacatcatgttatttatttaaaaaaaaatgttttgctggggtaggctatggctcagagggttaagtgcttgccacacaagtctgaggaccggagtttgaaaccccagaacccacataaaagctggacacagtagcatgcttgcctttgagtctagtattgcttcggggagatgggaggtggagacagtccctggaagcttgtggaccatctagcttggatcatggaacagataaacaagagaccctgtgtcatacaaagtgggaagaaagggtcagtgctaaggttgtcctttgaccctcacatgcagcccgtggtacacacatcccactctcacatacgtaattatgtttgcgtacacacatacacatgtgcacatacagatttctttaaaagagaaagctttctgtcttcctgatccatgctaacatgtgtgtgcagtgtgaaactattcatagagaacacgggtaagcaatgatagtgcttagactccgcatcgggtcgcaaattggttatcaaggtctgtaagctcacggaaagcataacataaagaatacacccttggagcatcatctaaaaaccgcaggccctgggaatgtctcgccgggcatctgaaggtatttattgacaaggctgatgacgtgggtagaaagagagacaggctcctgtaagctgtcccctgccttccatgtgtgtgctgtgatgtgtgcatatccaaccgttccacacagcggaggaacttgtctgtagagctcccatggggtacaagcattaggctgttgaaaaaacgtgttacctgagacagctatggttgtgggcagggttagctttgtgtactagtttggctcggtcattttctaaacatgtagctctatttcctcaaccaaatctagctgctctgccgttctttctcatgaatatacatccaacctaaatcttctttagcaagtttcaaaatcattcagtgacatttaaagaacactcctcagcaggcaggctgccccggcgtatgattcattggttagtgcttaataacaatactaggaatgtatttcctaagaattttgaactggtgagaggtagtggtctgggtaatgctgagagatttttttttttccatcggtggactctacttgcaactaagagccagggagctcctaagctctaaatgtaagatcttgaactttgagcttgtacctaaactcagtgtccagtaagtctttgattaaaatttaagtgtatgatttattgctgatggaaataaattacagataaaattgtctatccatattgcttatctattggtcaggttctggggactggagtagagaaaggacagcttggaggggtgtccagaaactgccactgattttaattagtgcatttgtcaagtttaaataaatccttgataacatgggataacatataaaaccatagaatcttcagtgttcacaatgatttatttccaccttttcaaaccatgttcatttatgcgtgcatcaatcctttcaaactgtattcagttatgcgtgtgtgcacagcatgctgatgtggaaggcagagaccactcggggaagtccattctctccttttaccacataagccgtggggattgaactcaggtcatcaggtttggcagcagtgccctcccccactgagctgtcttgccagcccctcaatcttttcctgttttattggtgaaaaatcagaggagaaagaaaggatcttgctgtggtcatgtatgccttttctagaggagcacgggttgggacctgacctcttagttcagtcttgcttcctttctaggacattccaacactaattgagagggagtgtgtctgtgaaggaattcagttaatggggtatgaactgaggggaccaagttgttctcagtgaaggcggccactgctgaggatgcccgagtgagggctgaggaaatgggccttagaaatagatacgctaagaaaattactgctgtatcagaaacaacatggtcaacttaatgcatgccactcataactaaaagatttgtgagtcattttgctccgaaaatcctcaacaaaataaagagggatgtctggtaaatacgtctgacattctataatctgtcaaaaatcctgtcgggaatgttgtaagtggggaatccaacaaggcaggaagtggaagacgcaggctgatggtgtggactgctaaaagacgcttacattttaaagactattttttctctataggcagcaggtctcaacttgtggatcatgaccccttgggggtcacatatcagacatcctgcacagcagatgtttacattatgagtaagagtaagagtagcaaattacaattatgaagtagcaaaacaataattttattgttgggggggtcaccataacatgaggaattgtattaaagaatcacagcattaggaagcttgagaactaatgctttacagtgttggtgatcaaaccaatgccttgtatacactaggcaggattcccactgctgagctgaactcccccagctctggagattgtgtgtgtgtgtgtgtgtgtgtgtgtgtgtgtgtgtgtgtgtgtgtgtgtgtgtgtgtgtgtgtgtgtgtgtgtgtgtgtgtgtgtgtgtgtgtgtgtgtgtgtgtatgtgtttgacattttgtctttggaaatgaagtcttactgtgttatcagaatatgtgaagaaaataaaaagaaaatgatgagaaaagatagagatatgacaaatgggagcagaactcccagtgtctggatgcagagtacctggaagaaaagtgacagtaaatgggggcggtggacaggctggagagaccatcaatacagatggctcactttcaaaaatatttgttttgaaactttattttcattttctgtgtatggatgttttacatgccatggacctgtgtaacatacacatgtgatgcccgcggaggccagaagagggggtggggcgccatggaactcaagttacaggcagtgaaagtaggagctgggatccaacccgggtctctgctctggaattctgagccatctctctagccccaaactgctcactcttaaaaagatggaaatttcctttggaaggactcctggatcgtgaagtatggagaagaactttgacttcgatgtactgaaatgacctcaagcaccaagaaaagattccacatgcttgtgcaaagtcatgaccgcttaagggtcccacagacagaaaatgatagaggaccttaagaggtgtgccctgcatcaatgaaggaggataactttacatacagcctgatgtataagaaaataaccacttcatgtgtgttatgaagcacacactgaaaactttgggaaagtaatcggatcaggacaggtacacttaggagttttacaggagatacgatgaaagacaaaccaacagtaaagcttcttgggtgcatgtagacataggtgtcccgtgagcccaaccagccactcttttgtttagggagttatttgattggggtcttgctcacagtttcagagggttagtctattatcatcacaggaagtacacaggcatggctggagctagctgacagcttcacaggtagagagagagcggggaggagagagagaaagagagagagagagagagagagagagagagacagacagacagacagacagacagacagacagacagacatagactgggtctggcatgggatatttaaacctcaaggtccacccctatgacacacctaatacaacaaggccacacctcctaaccctttggaacagttcatcaactgggaactaagtgcaaatttatgagcccgtgggtgcattctcattcaaaccaccacagggagatatagaacttgacaaaatgctttagtttgctagagcagctgtaacaaagcctgtcgactactggattaagcaatgggtttgtcgcttataatcttagaggttgtgagtgcagaaccaaggcacccagcttcctcctcaggaggcatggcttatggacagctgtcttctccctgtatcttcatgtagccttccctgaagtcacctcttcttcttaggaagtcaacagtcataccaggtcctaacaagcttgctttaagttaatcatgtctaatgatgctatgcgcataaacacagtcacattctgaggtcctggggtttagaatgtgatcatataaaagttggaggctacaactgagcccataatactggcattgtcccagcccatatttaaaaattgtacaaattcatgatcactcttataggccatttgcagggccattatcaatgctgcatatcacctgtagacattgctaaatttaataaataaataaagaagttaatgcaaaaagacagtaaagagtttgaggacagcttgggatgaattttaaggccagcctgagctactcagtgagactcagtcacaaaaataaaaatgagagagagagagagagagagagagagagagagagagagaaaagaaaggaggaccattaattatggtatcagttaaaatattgctgtaagaatgaaaatggagtctatagcttttaaaccagaagggaaattaatttattaatagaaagtgggaaggagaaagaaacaaaaatatggtaaatgaaaaatagaaaatgaaagagcagacataagttaaaatacattgggtgaaatagataaaacacacttactgaaagaaaataataggagtttaagaaggtccaaaagcactgtgatctaagaagtaccatcgcataaaagccacagaaaggcaaagagtgaaacagcatctggaaaatatgcaatgaaaggaatctgggacggacattttaataactgagaaagaaaacccagagccagaatctaaaaatggacacagatggatattatatatggtgaatggagtaataggacaaaagacacatttgttttaacccattatacatatactgagatagcaacaaatatttccaccaaagatctagaaaaacttcagcaagacatagataatcaataagtatggattgaaatgtcattgccctcaaaggccatagatcaatcatgtgtgaatatgcatacacacagaattgtaaaaaagtattaattttgatgatctgaaaattacagtataattgtgttgtattctatacatacacacatatacacaaatacctattcataaatttctgtattctcaatgaaggatatctattattttcacagacacatgtagtattttacaaaacaaaaccataaatcaatttcacctgtttttagacaacagcacctaacacatacttcatttgtttagaagctaaatattttaaaataactcaataattgaaaatattatatgtttaaatttgtgagtgtggtgaagtagaaactttcacagatttaaaaagtaacaggagagaaagactacagatgaactcattttctgctctggaagttacaaacagtggtaagcacaatcaagatggcagaaggaagagaagagaaccacggaaatcaagaaaatcaggacaatagaagagaagattaacaaagccaaaacttgattctttaataagactaacaaagcagacctctggtgagattagtcaagataggagaaaacataaacaaaaagtatgagcttcctgcggacacaagagatcttaatcaggtttacctgaaagaccagataagtaaaaaaatcactaggaagacataaaaatgttaaagtcctcatgggaggagaaattaaacaaccaaataaataaaacctgaaacagtccttaaatatgtatcccatagcaacattaagaaaaagcaaaaattctaggttccaatgacaagtaaatttcacagaatagcaaattcggtattgtattaattgttatggaaagtagagaaagactagagttgactcagctgttaagagcacttgaagctctgtaagaggatctgggttctgttcatagcacccaaagtcttacaactgtgcaactccagatctaggggatctggcctcctctgctgacttctcttgggtactacacacagacacctatagatacacagatacagacagacagacagacagacagacagacagacagacacacacacacacacacacacacacacacacacacacacacacacacacacacacacacacggttttcaaacgtagtagagaaacagaaaataaaaataaatcctagctgggcagtgatggcatacgcctctaatcccagcattcaaggaggcagaggccggcggatcttccaagacatcaaaggctacatagggaaatactgtctcaaacaaaacaaaacaaaacaagaaaagtaagagagtgacagtggcaggttctcccctgggttctgtggcctcgctagccaaggatagttggctaggtttacagcattggacatgatttccctcctattcagttggccttgcgtccagtgaggtggttgttggtggcccttgtgaagttgtagtgtcttgctgtgctggtcatcgctgtggcccataggtgttagagaagcacaggacagctggttgcttctgtctcttgggaacttgcgtagttcctcccagtactatgaaggcaaatcccggggaaggaggcttccaggtcagatacagaccagtcctctatgtcccggtctgagtgtgcagtctcttaccttccttttctggaaggcaatcaaaggcagtctcttgggcgtctcttggtgccctgatcacaactcaaagggaagtttcttacacctggcactggggttctttttattagtatgtagtttcttggtgtgggcaaactctgtaaccccaagaggaatagtttcaattaaacctcagttaaaccacacacacacacacacacacacacacacacacacacacacacacacgcacacatgcatgcacacacacagtataatcttgagtaaacacaatttcttcatttggttgttctctataaccatttgattgctgctgggtagcacatagccgtagtcagtaaaccctcacctgcttgttgagtgtcctacattctcttttaggcaccttattctctgtatagggcaaccctgaggaggatttttgtcttttgaggacaaacaatattgatgcattcaccataggaaggaggctcccatgtctcttttcagttttgaaacacaaaataaatgtaaatttcaaacatgcactgcattccaaagctcccccccccaaggaatgcttttgtactttacacccccatgaactctgaccatacaccctcatctggaaggtcgattccgaggtaactgagcaggctgccaagttcagccaggaaccctatcatttctgggttatggatgcctttccctctgacagctggaattaaatgttcagaggcgtttggattacattagaattgcacagctgaatcttggtcacctttctgcagcagatggaatctttaaaagggaaaggcatttatgtgagttcagagaagcagccaaagagagatccatgaactgggatgctccaagttggggctaggttcagctagctgtcttgagagaagtgtgagctcagtgaagccttggcaataaagaacactggttggagcactccccatggacactttcccattaagaaaattctcccagcagattttcccacttagaatccttttaagattaattatgaaattcaacacccatcatgggtgcacataattccggtatgtatgtaggcaccctctcttagataattgttttatttgtccatccataaaactgtgttgagtttaatgatattttctgtttgtatgcgtttgacactacctttgcttattgagaaagtctgctgcggaactgggctagatcctggttttgtttccttaccacccacctatccaccaatcaagaatgagatggtgattaaagtcagacctaattgataaaaagaagtctgccatcttcaagaaggctatgggtgtagggttgtatacagatatctttatatcatgattcctgcctgcaaagggaaaacagtgtggtagccaaaggcaaaagtcccgagtacatccttcaggtcccctgagccataatggaagctgttttatgttataagatggtgaatgatttttgaggcccacaggcagcaccttaggatttagagagatgtgtttggttgtcaagctgacatgcaatgtacttgtggtggttggtcctcactgtcttcttcatgggatttagagttgccttggagaaaacctccaggtgtgtctctgagggcatctccagagaggggttaactgagagggaagacccgctctggatgtgggtgacaccatcctatggtcagtgaaatcccagcattcatctctttctgcttgatgcacttgcaaagtgacctgctgctctaagatcccgctgccatcatgaaggactgaaccctctatctgtgggccaaagtcaacccttccttcctgatgttacattttgtcaagtatttgatgggcgatgtccttctgtatatatgtttgtcttattggttgatgaataaagcattgtttggctagtggccaggcagaaaggataggcagggctaccagatgaggagaattctgggaagtgtaggctgagagtaatcgtcatatgagccggggaagataggatgtgagtcaggcgttctccagtcagaaagaccacatggaaatacttaggttaatagtaatgggttaataattaacacagagctagccaataagaagcccaagccaccagccaacagttttatggttaatgtattgtccgtgtgtttatttgaggctgatgcagctctgggaacagcctggtggaaagaaccatcctcaacaggtattttgtcatggcaatgaaaaaagcaaccagcataccagattggtaaattaactttgtaccaaagtcagactcccatcgttggcctctagatggacaattcagagagatcctgtggtcttagcatcatggggcttcagtagtagaaagcaatgtcattattgctattcatgtcatatttctatttctcaacacagcagtcatatgttttgaaaataataatttttcatctatcctgatttgtgtctgaatttaaactttaccttctggttaaaacttctcttcttgctgagtgttagatttacttttctctgtgctttcaagagacgcataccatttctggaggtttgatgacaaagacatgctaatcaacaaagaaatcactagtcccaaaaatatcctcggcagagactgcattttttcttttgacgccagtctccagtgctgagctggctctcctactggtgacacttcctgaatttggggcttagttttctattgttgctagcaccaattgccatgcagcatcttaagacaaccagatttgttgttttgaagatttcatgcttaggagtccaaattatcaatcttccagacccaaagtcaaggcgtgagcaggaaccaggcctttctggaggctgtaggtgagaatctgtgtcttttatcttatctttgaagctctagaggtcttatttattgggtcttggcctctcttcccaccctcaaagccagtgatcctctgccccgattctcttccctcccattgctatgtgacattcctcaacgctgatctccctgtctccacgttacaaggcccccagtgattatactggaaccacctccatagtccatgataatctttccaattaagtttcttaattgcactggcacattcccttttgccaagcaaggcagcatatttacaagttttggggatgaggattttaatgttttttgtttgtttgtttttggatgagtttttttctgtctactagtgaaatacctgccttgtggaatgtattactttagggtgagatggcatggacctgatggattggaaggagttactatgatgaaatgtctcaattgtgatggtcattaaaatgttcacaggcagggtggtccatctataaccccagaatttgggaggctcagactgtaaggccacatactaccagttcaaggctaacctaagctacagagtaagactttgtctcaaaaaacacaaaccaaacaaacatgtccacggaactatttctctttattcgggggtggtggaggtgctttgataggctaagtcctcctttagagggggcatatagtggtatgcttgatttcagaaaataactctgctttaaaaaaaaaaaaaaaccacaatttccagggcagggctgaagagatgacttagtggatgaaggcttttgccacacaaacctgaagacctgagtctgatccttggaactcacataaatgaggaaggagaggagcaattccacaaggttgtcctctgacctccacatgtatgttctacaaacacatcacttgtacaccacacacacatcatatatatatgtatatatatttcattagtaataattgaaataaaaatttaagttttgtttaaaataactgttaaaagttataggatggctattgggagattaaacctttgttgctttgtgcacagagaaatcccatgtcttggttgtcagggtgccgactggattttggacaagagtcattccctcactcttgtccaaagaaggtaaaatctcagaacatgcttttgaaaatactcttccctgatcatggagcggtgaggttcagtcacagtaaacccaatcctattattaatttcttttattcttctattcatttcttcaaatgctgggacatctgaaggtttcacataattttctcacaattaccttgttttgttaagaaatacatacaaatacatacaagaatgcctgagtccttgttgttctacttaggttagcaatagcacaaccaaggagcctcccatgttgttgttggagaactgggtgtgtggctttactttcatatatatatatatatatatatatatatatatatatatatatattatgaaagaaattagaagcagctcccatggctgtaaatcaggggttttgaaatacagcaagaggggctggagagatgactcagcacttaagagcacttgctgcttttccagagaacccaagatctgtccccagcatcaaatctagccttcctgttgtgagtctcaggacctgtaattctagggggtccagtgccccttctggtctctgtaggcagctacacaccccccttatacacacaaacacacacacacatgcgtgtgctcatgtgcgtgcacacacacgtatataaaatttatctttaaaaagaaggaatttcattataactggattaataaaccatttattgtattcttatgacactgggcttttcacaaatgacgttctgggtaagtcttctcttcactcaagtactttattgagtgagtactgtacatagccctctcgatgggcattggcaaactgtgggacagacagttttgatgatgcaatgtcccagcttctcccgggacattattgggatagctgataaatagggtagctgccaaacatccctccatattactttctctcccagaggaccgttggttgagtgatgctaactagatgtgttcattgtcccactttccttttctcaataggtccctctttcctttttcaaataggtaaagtagacctatttgaactgagtttggtgggggatacctcgccttgtgggaaatgtgggactctgatgtgtcactgtcaccactattttggcaaattgggtttagtagcataacaggggaactccctgtttacaaggaggtcatggcttagctacaaggggcagctccatagcttactgtgggagatcagagcaatgcaagggcaatgacggatgcctgccagtctaccccagaagctctgggactggtgtggaactctgagttgctcggaattttctacaggaggcagtgtactcattaagtctcacaacactagaggaggttaacaatcatggaagagggtggtaggggcccctacagatattagatatcccatagagcaggccacaagacaacagctttcatttagctaattgcttttctttgtggcttaaggaaaataatgtaaatggatagatggagatgacagggaagtcttgaggggcctcatgatctaactaaagaactcacctttttataaaagctaagctaaaggcactgcatgagacatggctttggaagttatcaggctacaggttggaatctacgtctcattgagaaaaggctgtgggatttggatttctgttgatctgggttcaaattctacctggaagccttctggctgaaccctcttagtttccatttcctcctttctataatgggcataatagggtcaatccttcaggaaggagagcaacttcctgtgcatggacagatgaaaacagtactcgtttttttgtgtgctgcctcttcctttgtttggaacacggcagaaagctttactcttctgactggcctaggcactggtttgcttttctctcattgtgagaagacggaaggggccaagaatcagctcttgtggtctttctgctttctctgagtctgcctgaggtggggtggcagattctagatgctcctctgtactttacataggatctcttcctcttggttcatgtgtgtgtgtgtgtgtgtgtgtgtgtgtgtgtgtgtgtgtgtgtgtgagagagagagagagagagagagagagagagagagagagagagagagaatgtcatgtgttcgtatgtgtgcaagtgcacacaccagaggtcagcataagtgttttatggaacagacttgctaacgcagcaagggtagactggacagcgagcctggggaaatctccctatgagtctccctggttccgggattacatgcgtataccaccatgcccagctttccactttagttcttgtgggagaacgttttctgctggcgtgagagtttctccatcatttgttttttaacatgcttgtgttggaatttcccatgcatcccttcagtagctcccaacttgtctccccacttggtcctcatttctatgctgttttcaggtgcccatcacttatgctttcaccaagtgcttttcttgggtagcaattctcttgctcctttcttgaaccctgaagctttgtgcaatggaaaacctccatgtagatgtcgtttccttgttctgttctttaccccatgactccctttgttcactggctctgtagtaaaattccccttcagctctggctcaaacattgtcttacccccttaataccagatccagagtctgctttggcctcctgatcgtgacatcattgctgctcactggcagcctcaaatcttctgattctaatcattcatctccagctcacaatgtccacaggaagctcttcccttgtctactggcagaagctaatattgcaagggtgatttcttagggagccgtgctcaaggtgggggtaccacaggaaagcaggagcccccctcatttaagtgtgatgatatgtccatccatttcacagtgtctggcacatgtggaggcctagcaattggtaaagctcaggactggcttattattgaatggtatttagggagggtgggataggaatttcttataacatttgggattatacaacttaatcccatgttgatctattcacagtttattttaagctcaacaacagaaatggagagagaaatatgtatttagtgttggagacagaagaagaaattctctattcactgtccttgcttatctgtctgtcacttaggggcaggaccaccacctcagttctggtaagatttggctgtgagtttgatgaccatttacaaacggcccttttccttcccttttaactacaagtttggacacatgtctactttcataaaaaatcattcaccagtttgaacttaatctaaatctattcaaaatagaaccattttcttctggtgtgtttacagggttattatttttctgtttaaatctgtgctttttatggtggcacatttttgtacatctgtcatccttgccaaggggctgactgtgagcttctggaattaggaggcctcttgggatctttgcttttgccacagaactggcccagatccttacatgtggcaggcattcatggccacgaagcaattagtccatgacaagaacaccaagccagctagaaaccctttgatctacaagagtgacctgctaagccaatagtggcacacagcttgtgggagtgaccaaacaataaggcccactccatgaaatggaagcaatgcccggtgctgcctgaatggccatgaatagactagataggccagggacccaggaaaaaccaaatactactcttctgctaaaggaatatagtggcaaaatgacttcaaacaacattctgctatactcatagacctgttctgtagccctgagaaaaatgtcttcatcaaacccctttcctcagggctcagggaactccaagagggcttagaaagagtgtaagagtcagaggggatggaggacaccaaagagccaaggccttcagacaccacagtgctggtgcgtatatgaactcagagactgtggcagtatgcacaagggcctgcatgggtctgcaccagatggggtcctagggctgaaaggagaactggagccatgcctccatccgtatcctagaagctctccctaattggttgtcacttgcaaataaaaggttagttttctcggaaggagtttcactggggaaacaatccactcctaagggctggcctcttgtccagcagtaggtggctagcacaaactcgaggcatctttgggggttctttgtctcattgtattgagtcagagcactttttctgtcttacaggtccttgacatatataatatgccatctgcttttgtgtttttatgggactcctgcatgtgaatatgtgtacacacacacacacacacacacacacacacacacacacacacacacacacacacgaaatcagttgtctatcagaattcaatgtaaatcagttttcaaaaatttctttgggggctagattaaaaaacactgttttgtcatgtatacataattacctgcatttatgtggcaatctgtgaagtttggacatatatatgtatacatagtataatatcaacagaagctttagctgatcttctggagccactttgtgtgggtttaagagagcaaattaatatgcattcaactcatgcaaatgagttgtttggtcactggtaccttgaagctggaagtatttacaccacagatatcagcagaggctatgagctagcatttctttttctttctctccctccaatctttccttccctttctttccatgagataatgtcttactatgctgttcagaatgccttttcttggccttccaggtactgggataacagacacggcccactgttctcggccttccttgccatccctttgagagatcagtcaatggtcttccactgaagatgtccacaccggggatctcaaaacccttgtgaaaaagacaagccctgagcaactgattaccacttcatgtctcactgacttcagtcaaactgttcctaaacagctaaatgtgcactgaatccatgaattatcagttaatcaaacagagatttttgtgaacagttgtgttgagggaaaccaaggataatgtgtttacaatgaattcatgctgaccagttcaggtcctcctcctcctcctcctcctcctcctcctcctcaaaacaaaaacaaaaacaaaacaaaacaaacaaacaaaaaacaaaaaaccccagaaaaataaaacaaaacaaaaaaacccaatggttgaagcaagtgagatagaccgctgatagcctatttctccaaatgacaaagctagttcaaggcatatgtatgattaatattggtctcatgacctcctaattgctatccacaagcatattttattttctagaaatgtgtcttatcaggtcgatggctctatcagggaacattctttaaagagtgctgtgttagaagaaaatggtggggtgtgctggggttctctgaagcatcttaggacatatcaagataaaagaggattataaaccacttctcactttctgatctccagcccagttcattttgcaatttcccacctgtcgtacccactgcacagacattaccctcgttattgtccctgctggctctctgacagcttttacaaagaactctatactcattaaggcctccatacggtagtaatttgaagaaggaagtgctagtcaactttgcatacaatagattatctttgggcagattttaaaaagagagaatgatcccattttaagacatttatgaatcttagttgtgattattacttttttacgagttgtatgtgtgatgtgtatgtttgtgtatatgtatgtatacgagtgtgtttgtgtatatgtgcctgtgtgtatgtatttaatgcgtatatgtttgtgtgtgtagtgttggggtatttgtttgtgtgtatgtgtacatgtgtgtatatgtgtgtgatgtttgtgtgtggtatgtgtttgtgtgtatgtgtatatgtatgtatatgtgtgtatatgtgtgtgatgtttgtgtgtagtgtgtgtgtattgtggtgtgtgtgtgtgtgtgtgtgtgtgtgtgtgtgtgtgtgtgtgtctatgtggtgcatccatggaggcaagaagaaggtgctggatcccacggatcaggtgtcacaggtggttgtaagccaccgaggtgggtgctgggaactagtctcaggtcctctgggagagaagcaagtgctcttcactgtgaagcgtctgtccagcttctgatgactttgtgcatcaacctgatggagtctcagtggtgactatctgttagggcagcctgcgtctgtgtctgtctgtggggactgtctgggtaaaagagttccatgtctgtgtctgtgggcactgtcttggcaaaggagtcctgtgtctgtctgtggggactgtctggataaaagagtcccatgtctgtgtctgtggggactgtcatggtaaaggaggcctgtgtctatctgtggggactatcttttttttttttaacaagtatgcagaattaacttactaaattttttttctctctttttattattattaattcaagttagggaacaggcttgtttcacatgtactacccctctccctctccctccccttacccccattccttctcccccacctccaacctaccccccaccccatccacccaccactccccaggcagggtagggcccccaaccggggctccaccaagttgtggggactatcttgattgcctcaattgatgtgggaagacccagtatgaacgtgtgcagcaccatccctttgtttggggtcctaaactacttaagagtagagaaagctagttgagttctgagaatgcattcattttctctctgctcttgactgtgggtgtgatgggaccagttgttttaaattcttgtcatggtagcttcttcttaggatggactagacctggaactgtgagctaaaatgaaccctttcttccctaagttactttctgttaggatgttttatcatggccacagaaatgaaactgggatacccctcaagatgcttctcattctagccacaaggtatcagaatagtacagcctaatatagcaaaataatgctgggcttcattttactcaatagaaaagtgcaagatatccagacatataaaatcacacggggtagtttttaaacattgtattatgtataaatgtagcattttggctaaatggtcttttggcatcttaactttggtgtttggtacactgaagaatcttagacaggctggtgttagccattgtgattcagaagggttaaagccgagcgtagcatgtagctgcatatcttgctgtctctgactgttgaaaagcgccaggtaaggacattcaatcaccggtggtggagtgatctccagagatctctttctggctccccacaagtgctccttgcttttcagcagtccaccgtgtgcataaaattaacagcatgctgcaaagggcttcttatactgtaaatggagccccttaaagcgatattccttcccacactctcgcagccttccggtgagaattactactgggctctgctcatttgaacagaaggtgtgagcttaaaggcaccaacaaacattccggcaatatattagctgtcctcagtgacttttgcatgcttgggttactcgcaggctgtgactggcttcagaaaccaattttactaaatactaaatctttaacaggatgtctttggggagactgaaagaattctgaacaatggctccccactacactttcaggtgtacccctcatttctggttattttagcacaatggaggcctgatagaatcactccttctgtgaagatttccacatcaaacttatgtgattgaccaaatagttgtcttatctcatagccttgttttgtttgacaagatcttgctacataacccaggctggcttggaaattgacatctggtccaggcaggcttgaaactcaagattgttctgtgtcacccccccccaccagtaccatggtaacagttgtgtacctccatacccagtttctcatagatgttttaaataaggagacacacagtgcatcactggtcctcacggcatcttgtaagatgggaactatttttatctacattttaaacaccaagaaaaaaaaaggaagcaatatggccaaggtctcacagctaaacactaatggatactgagtcctactttctcttccctccctccctccctccctccctcctccctccctccctcctctctctccctccctctctccctccctcccttcttcctcccccccctctctctctcagctggggaccaagacagggttttgacacattctagaaaagcatactaccattgtaccattgtatttttctactgtctctgctgttctggtctccctggtcctttctacccttcctccaaacagtcccgaggctgccgtttgtacatgcctcatccatttcaatctagattctgcatatgagaaaaatgcaatgttttctccttctttctcctctattccccattcttgttccctttcttcccccacctttaggttcatcccctccatatccctcccgcttttatgccttatgtaaactggtatttcaatcccagtagactggctctgcagcctgtctcttacttcactcttatctttaaatgtgtcaaataagctccatgatgtgcccagaaatgataggaacaatatctgtgcccttgaaaacatatagccccacagaggccagatatgccattcttccttggtttcatatttaaccagccctgtataggcaagttcaaccatattaagatttttattgatttttgaagtaaagcattggatttccacacttagtaaacaaaaatgtgcagataaatttgaacttcagagaagcagtaaacagttacttttcagtataagcatccccacaatagcgtgggacacattattgtatgaaaaataatttgttgttgagaaattccaatttaattgtgcatgttgtatttcacgtggcaatcctaagcaggccgtgctttagatctggatgctagcatcataaaagtcccttgtatctgctgaatacatttgtggatgtacacacacacacacacacacacacacacacacacacacacacacacacagagagagagagagagagagagagagagagagagagagagatttgtcttagacttgtttgcttagagacagagtgttggccaagtttgcctcaggcctggctttcatgagatgtggctggtccaccaaatcaccttcatagtccctggtgtctttcaagtcctggtgagacctggggaggacctctacctcacaagttctgcacttcactggctgcacagcccatggaagccgattgcttggactaaaacaagcccctaagtgttattttaacgatgtgatccccacattgcaaatggccctttttgctatggcctctagaataaagtaatcgaccctgacaccatttagcaggggacacataactcatgtcatggtcaattatctcttggtagacttcagcacagtaggggccattgtccacataatgactgtggggcttgaagggcctatcactgtgagggtcccttgcaggcctcaccttccaggtgtgagcaaagcttttgttagtatttgcaccccatcccttagcactgtgcctggcacatttaggatcctgagaaacagtactctgtgctgggtacaggagttacaagaagtaacaagcaaagtcttgtctctattctcaaagtccacagtctaaaagtttcaataaatgagtaggagacacttagaacagacacttcgagatctttgggagctggaggaatccctagctaactagtgctaagataaagaaacagcactgtgcatggacttcataaccagagccagaagagcacaggccagaaaccctagtatactgtattttctttaagcaagctacaaaatgttttctatcctcagtttatacatctgcaaagtggagatgatattgtaacccaagtctttaagacaaaaatattcatctagaaactgaaggatattttatcgtcataaaatgtattgtgcaaagcatagcactgaagtcacagagccatgcatgtcatagagacatagagacatatatagagagacatagagacacagagacacagggacacagggacacagggacacagggacacagagacacagagacacagagacatcatagagacatagagacatagagacatagagacatagagagagacatagggacatagggacatagggacatagggacatagggacatagggacatagagacatagacatagagacatagagacatagagacatagagacatagagacatagagacatagagacatagagagagacatagagacatagagacatagagacatagggacatagagacacatggagacatagagacatagagacacatagagacatagagacatagagacacatagagacatagagacatagagacatagagacagttttacccaatggctagcgatggggccctgcagccagtatatacttaggctctgtcacgtgacaaccccctgacctgtagcttgtggttaatatcctgcgcctcagtttccttttctgttaagtgaagatcattgtggtaattagctcaaaagattctgtgatcgttaattgaactaatacacatgcaataaacgtgcggtggatattatttatagtcaatatggattgcacacaaaccactcatctaattccagacatctttccattccaacaccagttcaagaatcgggaaaggagatagcaactttattttctatttcgtcaatcattttcaattcaagagctgttcctaaaatcatattcttttgtcaataacccctgaagagctgccaaatcaaaaaattcatcaatggaaaatgaggagaaattgaaaactgatttattcattctaagtcgataaaataagccaacagtagctggattgtaaataccccatgcaaagtgagatttacaagatgtaatatcataagacggatttatcccgtttttaagtatagcaccattgaaacgagtgctagctgaatttataaggtgaagcctcaaatgagcaggactggggagccttggggagtcaggctgcccatgtttgccagcagcagctttgatttgcattttccagaaggcaaattggagtgttttctgaaaacactgctggggaaaggagaaaaacaaccgggctaggagcatcagctttgtttaaaacttcctgttactcaggactgttaggtttataaatcaaaattatgtgtccagcaaggaaatgggaagtaaaaatgtttccaaaagaaaaaaaaggtaaagaaaagaaagcaagtgattcattttgagcaaaataattgaaaatgcagagtctgcgtgttccgggctgctcagcctgggcttatatggttatattttgcctttgcttcagtgtagccaatttcatgatgaagatgagtcccttggaccaggaaattcatactctgtctggtgaaattagacagagtccaatccttggctacttgaaagatttgacttctactttactagagcccagtctccaagaaacaacagaaccatggctctgttcctttcatgtaaaagaaagagaaggaagggatggaggaagaaggaggaaggaaggaagatggaaaatggaagagaatggagaacgggaagaaagaataaaaagaaaccaagaaagaaaaggaaaggggagaggagatgaaaagagggagggagggagggagggaaggagggagggagggaaggagggagggaggtgacaacctcaattactttctccagtggtacccagtcagaccaagtcttacaccagagcgactcttggagttctcctttgaggaccccaatcacatctggcttcagggttgtaatgaatgcagcccacggaagatgtgagtttgccgatagatagctttgaaatatgacagccttgaatggagccaacaattcccagaagtatcacacattttcttggtgtctatgtacaacaccagagaaaggccagggactaagatctcatagttcctagcttccctcctaggaagtctgagagcatttgaaaacatccatggttgacacaaaacactgtagggagagtctggccacacaagaggtggtatcacagtgaatggagactgcagaagaggaaggactcttcctccccttctgtggaaattgaggaagactgcttgggggaagcggctgtgaagccgagctctggggtgtggtcaagagtcaaggaaaagtggccagcagaggctcatgaagtgaaaaacaagagatgaaagactgcataggacatttatataaaaaacgggtgatggttctgacaattaacaaacagtggttctcactgcctgtctattttttgtgtgagcggagaatacaagtccccatctctatcttctagcacttggtactctatgaggtaccaggcatttatttgctgtcccaaagatataattgctttatagcgtatgaatattagcctctgagggtggaaaggaggtaaaaggattgtctaatatgcctgggttaatccatggctatgggaacagatgaaaatgacacaaagtagcactttgaagctgagactagaatgtcaaactgcctgtttcaacttctgggctcttcccagtgtgttacacaaactcagctggggagaatggtcttggtaaatatggcagtgttgcttgtattcttgtgacccaaacgagggaagtatagggcagccctgggaacaagacccatctacacataccctcacccaaggctccgcaaacgctggaaagagaacttttaaaatgaagtctcgacatacatcattcatcttcacaaacaaggcctcacccagtcacaggcaaaagaggagtctaatttatacaagcagtaaagtagacacttgaggaagagtttaaaatacaggggccttcttaagaacctgaaaatggcaaggttttgttggcacacttttgttaacttagaggttttattttcttcccattcaacatgcagacttgtgagggatccaggtgtatccctccattctagtagcagaatggaacaggtggatcattcttcctacagacagtccaggtagcacactgagacattttaccaaagttcttaatatcagtttaattacgagttacaagacctttctctgttgatggctgtcttagtaaaatagacatcaaaaccccaccttgagtatgtttgcattgtgtcacacctgaccttgctggtcacacacaggccttgctgtggacatgtccctccagctgggcttcactgagtgcacatttgacagaccccccctttttttaaatgggtctaatcaagtgcaacttcccctttctagcccagcactaaacaaatccaagctttggctttctaatttattagccagtaaattacagcagcaaagcttttgtatatacggacagtgatttctaccccctcccatagaatgagggacatgggggtggggagggcaggaccagcagactggacatgtgactcactgtgcttgtgaacaggggcagctccagtggggaagagctgcattccagaaaaggaaattcatgtctttctggtttttaaacatgtatttattgtgtgtgctcacatgcatgtatggatatgtgactgtgtacatgtgcgtgtgcctgtaggtgtgcgtgtgtgtgtgtgtgtgtgtgtttgcccagggtgcatgttgaaggtcaggggacagctttcaagagttggtctttcctcccacagagtggggttctggggattgaactctggtcatcagatttgacagtgatcatctttatacactaagccatcctgctgtccggtagatgagaaaaatgtgaaagacttccttctggccacgggaagtttgaataatctggtgaaaaagaaggcacagcaacttgcacacttaagaaatgagggagaagctgagaaatgggaagtgaggtggctttgaagcacgcagctccccgagagtaaagcagaagcatgagaggcagctcccagagctcccagattctcccgggagtcattcttcttagatgcctagtgttctccatagttcacatgaacagagagtaatactaacatacatgactgtgtctccagttacagttccatcctgaagcctaagtttcctttagataattgttggaagttacattatggttaaggacgcagcaagttgcaacaagaatcctgtcactgggtttcctctcagcgcgatgctcctatcaatcagcggctcagagaccactttactcatcgttttcttcctcctgttttcatcccatcaggcactgcgttgctctgttcctctattaaacctcagaattgaattctcagcttattttttttctgactttagctctgctgagagataagctcattcagtttatttgcgctctggatcatgaacaaccatccctcttagactaggcgtgtttcaccagggctcactccatcctacattttcctgtggcaaaagtacagtctctgaaaggtgacccagccatacaggagaggagggccacaagggacactgtgactgagatgtatggtgacagttctgaagagagtcaaaaccatttagagaccaggttttgatggattgcaggaaatggcggatttgcaaccattccagagttcccagggaacaactgtcatcaggtgaccacgaggattttaactagtgcattgtagaactcagatcaaggccgttagtcaggcagaaggttctgtttgggtctccaattgggtagacatcacctctgggagacgcgtttaaaaattttaagtcttatttacatgtatgtgtgtctgtagtgtgtatgtgtacatgtgtgtaggtgctaatggagtcaagaagaggacgttccctgaagttggagttgcaggtggtcgtcagctgcccagtttgggtgccaggacccaaccctggttctctacaagggcagcaaacgctcttaactgctaagccatctttccagtccaaaaagcacttaaatttttttccaccaaagattcatttttattagtctgttgggaacaataattagcatgaaggagggaaaaacctactgtaaaaggccctgtcttaagagtcttttctcctgaacattaatatgggtgtagctgctaggaaatggaccaacttttctttctacatcaatgtgcctccatccttcaggagcccctgctgctgctgggtcaggctatgtagtagggactggctgggcattctgacaacctttaagctttttggaaaacccctaaatatcatagggtgacagtgtatgtaacctaacacacactgacttgatttgagttctctaggacagttgacaatgaaattaatagctaaaggaacaaccgtaatccaaagcttggtgatgaggctaacattgaatgtccctgatcgcctattgaatggaactcagtcctggagactctcattgtatcattttgagggtgtcagtggcagctgcatttcacctgtgagttccccctcagttgcctctctgtgaagcatagcactggccctgcagagcagtctctacaatggctccaccctgatcactctggttctggaagcaagtctcaagatgggatcttcccctccaaacacaatgattcaattattcaaagcaatgagatattttcataaaggcccacaatgctctaacgaggccagtaatttaggaagtggtgtgaatgtgcaatcagcagaaaagggaagcccccaccccaccccgcccctcggcactgtggtgacagcacagttactcaaggagcatttcagatgcagatacctctgtggtttgtgatttgacccagcgctgcagtcaccctgagaaatttctcaaactttggctaatcactttttaaaatgtaaggcttagtccacgattgtacttcctcaaacatccggggctgtcttttgcatttgagagggtagcaactcgcatgcaaagaaagatcaagaaagctgtggcacacagaaagggaaacagctggaactctgaagtggcaggaaaagccagctgttaacacagaaaatagctaccatatagcggcaatgtagggctatctgcagaaggccagggactttgttcatcagaatactggagtgagctggttgcccatggttgaggagaagacgcatgattagaaggactgaagtcctccccagcaccccccgttgtcctatgtgcctagttgtgttaacagctgggcgtgtgtgtgtatgtgtgtgtgtgtgtgtgtgtgtgtgtgtgtgtgtgtgtgtgtgtgtcccgcgcgctctgtattttctcggccggcaagaaatacacgcaggacactcggatccttctgcagacaagctttaatgcatcttgtgaggggagagcataagctttccagagtggagacattgaaccaagaaaaccatcccttataaaggctgaccagccgcctgggacgtgttaccctatgaatggcttcagctcctcaggccaaaatgagccacgggataggcagagatcaaaggaatggagattacccagcgcctgtgaagtaatttacatcttggtgtcttcaggcacctattattgtaatggataatgcaggaaccggcttcctacatatccccctttttttattaattaatgaaaaggctttatatttttacaagcaaataggtcacccatatgttgagggatagaggcagaggttgaaccttcccaaaatcaaacattaagactgtgtacaagagtcgccatcaggctgttagcttgacccgaagcgctcttgacctgtcctctgccgtttttctgggaaagggagtctcagggcaggtaacccttatgcaggtcaacgtacctcccagagaagcctgcataataggcaactctgtgcgatgcctttgctcagcatccctcattgggctgcccagaccagacactctaccctgtgcaatgagcctaggctccgggtgtgcaagagctgtctggccggcggcctattgcttaagcatagttagccaaaatataagcgcttgggcggtctcttggtttgagccctggagcttacatgccagccaaaagtaacatcaatccgcaaacggctgcatcaaacaattccacccccacctctttctcatagatcagccagaggtaacagcaatccgcaaacggctgcatcaaacaatcccacccccaccccttaagcagtgaccatctctccgccaaggacaggagttaatctggataacaatagcggctctcagctcccggggagagggtggagttccgacttttgaaggtccgaagaggctcttcgggttgagtctttctgggatccacaggggattttcttcatcctgtgggaaaacataatatcgctcccctggatcttatgagaataggatccgggcctctccaaagatcagttaagatatctttccattttaccatttccttttggccttttaggttttgaggtgagacgcttggcccgagcgtcaatgtttatgaggctttaaagccccaggcattccaggcctttaagaagtgttgaatagcaggcacggccttttcccctatcaaagactgggaaagccatctgtaattttgtagggcagaggctaggttttgagtcacctagctgagctgttttctctaaaactttctctcttgagctttcagagtcatcagagctatcaagatttaaagctttaaacttatttacagaatcatctaacaaattattcactcccttgtcagtagacatcccaggaggtccttttttcttatttattgctgtttctcttaacaaattattcactcccttgtcactagacatcccgggaggtccttttttcttatattttattgttaggcgcgccccatctctcaccacattcggtttctgatatgtaattctggacttctttaagattgctacaacagtgagaaaagtcaaaatagctcctagtaaaagcatagaagcctctatattaacctcccacaatagcaacattcccaagccaaagtccagaaaaaacatacctctccgaatttaccaccctgcagttctgaatccgccttgtagccaaggggtctccgcgatgccggagatgttcatatgttcccaggtttcggcaccatatgtcccgcgcgctctgtattttctcggccggcaagaaatacacgcaggacactcggatccttctgcagacaagctttaatgcatcttgtgaggggagagcataagctttccagagcgtagacattgaaccaagaaaaccatcccttataaaggctgaccagccgcctgggacgtgttaccctatgaatggcttcagctcctcaggccaaaatgagccacgggataggcagagatcaaaggaatggagattacccagcacctgtgaagtaatttacatcttggtgtcttcaggcacctattattgtaatggataatgcaggaaccggcttcctacatgtgtgtgtgtgtgagtgtgtgtgtgtgtgtgtgtgtgtgtgtgtgctttacttgatttagagtgacatttacccttcttatcatgccttcatttggctaatttaaaaccttaaagtggaactctgaggtataactccatccctctaggtagtgatgtgacagaacaggtatctgtcgttccttttcttaaggagccagggtgaggtccatggactacaggaaactttgatgcgttctgtctgcaacatggcgaagctatggttctctcaatttgacatgtagaggactgacactgtgttttgtgttgtctcactcagaccatggcccacagaaggctcttcacaaaccgttctgtgagtggtagtcttctactttctttttaaagatctatttttaaaaaattatttatgcgtttggcacgtgtttgtgggtgtctgagaagccaggagaggatgtctgatcccctggagctggagttataggaagctgtgagccacctgacccatgtgctgggaagttctctggaaaagcagcaagtgctcttatttgtggaactgtcccagactcagcatctgtctgagtttaagggaaaagggacaccttggttgttcttaaaatctccctctgtgtctggcagggcatataaaaagtgcttaatgtttgcttgaataaatgaaaggcagcttctcagggcctacagtttctatgctgccgtaactcccctcttctagtgctccacatttgggagcccttgctgtgtctcagcctcatttccacgctcttgcctgctcagaggtacccaaggacaattccttcttcatccctccataggcaattttcattcctgtggttagcagtggctggtaaagaagagcagaagaactctagtctttaagcaaacccagaaccctgagcaggacaacccatgcaccactcatgctgacacgctggaatgtgcacggggactatagttttctgaaacccatcctgacaatcattacagttgacatgttttaagttgtaaatacttgctctggttcaatctgagcacatagtaactttccttgaacatcctttaagccttgctacaaaataagggttagtctcagaaagagaaagtcattcttaaagggcacatggaaagtgagagagctgagatttgacctcatatcattgtggctccagacacactgccgttctagaaccaagaaactcaaccatcgagcgcacatttcatcacagacccacaaacacaactcctttcttctgtgtgctctcatgaacacctgtcgtgatgcctgttgtggactcacagccttcagttgtgtaaacgacactatgtgtggagtctcctttattctcatatgtaaccctgtgaactatggagaccagagttatctggattccagacacagataaaacccagcccaggagtcagtaactcaccaagctggaaagcgattagcctcttcagccttcactagctcatgcacgcggcactcccttgggtacaggggacttggtctatgcccttcaggagccatcgtgtaatcaagaggccattgaggagcatgcaacactcacttctccatcccacactatctatggcttcactgagacaactcactgagcagttctgtgtggacatggaaataacacagtctgagcggtccctcatctaacagcctcaatgtttcttacatcctctccatctttagattccttgcctgaggcagcatctttgccacagcagatggcttctaagtggcttgggatggaaacaggtcccatgatccctttacaggatcacatctgagccgatagtttgcatacctcgctagcagaaccagcagctctcccctcccccacacccaaggcgctttaaatggaagctgggaaagctgggggactattggcttcaacttaacagtgggtggcaggagctcagaagtttagtcccagactgccgctaatttcctggatggcttttggtccatccattaatctctctctatcaccggttccttctctggaggagatagcaagaataacgggatgttttatgcattaacacgtttatgatcctaatgtgtgctgtaaaagcatagctttctaaaaatgtttggtggtagaaggcaaatcaaaaaaaattgtttctgtcttttagtatgaggagtgaatgagatttgttttgtttattttattttattttattttttgtgccatagtttgaaaccagacgtgactggactaaagatctgtgcagtttatcctgttaaaaaaacactgagttttcaaaggcccagaactgagttctctagcagtaaccacagaggtatcctaaaggagagatgagggggttctctcagtatcaggactaataaaatagaaatctcactacctcaagagaagggttttcattagtcacagtcattgttaaactgaaaatggtctcattaggagtctggctggaagcacttcactttttttggtacaacacatcactttggttatgaattttgaaaatatttcattgcatcatcacaacttatatgagaccggaaaggacaatgtaacccccaagaagtcatctgcataaatgacattgcttattctctgagaaatgctcttgcctattttgtgtctataaatttttcagccttgtaggaagagatgggaaggctctcaggagaactcaagtcacatgtgcaacgacctcttgcaagttagacacaaaatgtgattcatataaaactgatgtctaggccattgtaatttgaaaaaaaaaacattctataatgtcaacaattggcttagttttactctttggtgatttttctattcagagactattggggtttttttggcatcagaatagtgaaatttcttcatatttagagcctctgcccacctcagatttcttctgtaggttcaacaataatatctgctcctttcagttcctaacatgtcaactgagtctatgtggatcatgcagctatatgagaaaatacaatttaaatatgtcttagaatgtcttaagcaggtacatgagttcaaagaggctattgtaccaagggtctctacattgtacctagagggcaacacggtggctctttatcagtacaccttgatattgcatcatgggaaatgtttgtgagtgagatatagcaaatatatgaatctttctggaatttacttttagcattttatcgtttctctatgtgtgtgtgtgtgtgtgtgtgtgtgtgtgtgtgtgtgtgtgtgtttctttcacttcaagatggaagtagagtcttaagcaacctaggcaagtgccctccgtctcagtgcagtcataaagatgttggctcatgagtccactttgatttggggtcatttgtttagtgacataaagggacagaaatcaaggcaaactgaatatggaaaatgttatggttgaacctggactaaattcactctcttccccctgttatttgggagtgtagaatggattgtctgtgttgaacagagtaggggaactgaggggagaaataatagagatgatgatgatgatatatattatatatatatatatatatatatatatatatatatatatatatacaaccatcctagcataagttcacagtctagaacacagcatggtctgggtgaacctgaaagcaccaaactttgctttgagacaggctgtgtccatgagtggcccacatggctggcagaagtgattacaaaggctctgatagtggcagttactaatcctaggttgcacattttatttttaagggcaaggaccaacatgcactcacagacagatgccaaaggaaacaaggtgacatccagacctaacaggaacaaaagacaacagcacaaacagatatacacagataatcagattttgtgaccataaggtccacttgataggaaatatggaatcatgaaaagtgacagtgtagagacttagcttcaggatctcagaaagaaagtgaaacctggaaaggcgcagacattacatttcataaatccccaaagcttcatcctcgagtctaataaaaaatgcagtcttcagtatttgcgtctttgcaacaaaacccaaggaaccaggtcataggtcatgtctcatttattgtgtctataagatgtttaccttgactagacaatggtggggatgacttgataccctttctcacagtataaccccccagctacaagttcaggttggtgacttttggtgcctagaaagtagttatatgaatgactactgtcatgtttcaccatcaagggtagtgttttagcatgagggaaggaaggctctcttgtagggttgaggtggtcacatagtggagtgtctgcagttgtccttgggaccagacggaaagagtaaggctaagttctctgtccctgcctcactcgctgtgtactgtgtcgaagttcttagacatcaatatcaaagaacattgtgtgtgtgtgtgtgtgtgtgtgtgtgtgtgtgtgtgtgtgtgtgttatggttgtgcatactcatgaatgtgtactttttgtgtgtttgtgtatgtgtgtatgtgaatgatatggttgtacacactcatgaatgtgtacttaagtgtatgtatgtgtgatatgattgtacacattcatgaatatgtacttgtgtgtgtgcgcaggcgcgtgtgtgtttccatgcaaatgcacaggtggtgctatgcacgcctgctgccctttacattttttaaaagagactcagcactttgggttgtatatcaggacttctgcttttctaagctctggccctactgctgacaagtacttgtggcaaagttcccagaagcatctactcacaatgacagaatggatactttgacaattgtgttaattttccttaggcttgtgagagagaaatttgcttcagtttattgaaaaacttggtcacagtaaacatgaaccaaagaccgggactgtgaaaagaaaagtggtattttcatggtcacctgatattgaggtttctggccccagaatgttctatggctggaacaaaaacttaagagcttgcactggcactcttaagacaaggcttcaagagccatactgagtatatatgtatgtatgcatgtgtgtgtagtacagcatatgtaaatatatatatgtatatatgtgtgtgtgtatgtatatattgtggtaatgtatattggttgtgtgttatatgtatggtggtgtgttttccacaagtatgtatgtttgtcttgcacacatgtgtatggtagtgcctgttgtacgtacacatgcgtgtatttgtgtagcagttctcgtatagtgagagtatgcatagctatatgtgtaagatatggcatatgtgctgcctttccttcatattttcattgaaaagaaatgatttttttcctggtgtgtctaaatcctccataatttttttttaagtggatgtcatcaatcggataaagaaagcaggggtgcagttcccccactgtaaaatcaccataaaaatcaatttgcaaataaaatacaagagagaatgagtaatttttatagcagctagttttttttttttttttttaagtggggtttttgaaggggagcttggatgcccttcaacaaagacacagttgtatgcatttcaaagtcttcagcaaccttctgcagctggtgttctgtaattgctgactcagcatggcactcagtgcttcttaagacaactgagcaatgtaatgacaaaggtcatagggcaaagcgataagtctgtgaaatgggcataagaagaccactgacttcctgcagacagcagtgtttaatgcattagtgtaggttgagaaagaacacaaaactcagtgtagatagaatctttactatggcggtgactagtctattagagactagtatatgaagggcagttttgatttccagatcaaacatctaataacatttttagaagtgatggtgttgacttggctaccagctgtctctctcttagaagagaaccttgcaggtttgaagtacaaaggctgttcccaaggctccgatagcttgcctgcagttaaggcccagatctgcaagcacagggttctgggaaagcctcttaagggctatctgccttacttccctcaattccagtaacccccagtgctgatttctctgctaatcttggaagaatatgattttcatctgcctgggaggagtacctgtgacctgcacacatcagtcttgcagctgtccctttctgaggggtgggggtgagtggttattcatctcttttttgggccggttgttgcctatctgagtttagcagaccaggagcaggggagccggagcttggggggaagtgtagctctgggcacaggaacaccacccttcccttggagtcacattggcctctagtggctcacaggcagctgacagacggctcaatcatttcctcagggccagcaggctcccggcaccagctggctttgacattaaggctgcaccctgactgacaagggccctgtccttggctgtgccctggaggcacgggagacactattcaaagcctcctcgactctgttgatttactgtccctgttggccccttgtcgatccattttccctccccgtttgctcacagggtaccccagaaaccatcctttagtaatatatttggtttatgatttcctcaggagccaaggaagaaaaacaccgtcctggtgcacctgttggatttaatgtgcggggggctcttcagccaggaaggcatggaaagaaagagtgtgagggccccaaagccatctggagctcccattattctgtcagggtaccatcagaagctgaaagaagcccctttgaaatcgatttgttattttatttatagccatatttggcccccgctctttgtgggcctcactctggccaacccaccattacagagtatgattccaaatggcagttatgagggggtgtggaggagcagccagcgtgtagggaggacggacaagtgctgaggcttcacagtggagggaggaggccatttgttctttaccaacttcctcacacacatacaaattacaagagacataagataaagaaagtgcccaacacttaagggatgtccaaggggtcttagaagaagagagacaccctcatattctcttaacttcttttccctgggattatccatggaaggttttggggatgcttgaaatgaatctgcttttgaaatttcttttagtctggactggactgtttagagagggggcaataataaaccttcaacacaaagtgagtttgacatctgactgttttgaatccagatgaggtttcaagagttctatgtgagcctttcctttctccatctcttccccgcgccctttcaagcacatacacccactttccttgaatttaaagtgctaagaaaaaggcaaaagatgaggcttgggggtctatgagaaagaggagggggaaagattggaagagtcagaggtggtggtgggtgactccaaggaaacggtgtcttccagacacaaccttccagaatggtgttcgcatgaactcacaggcaccagggcagccatgcacaagacctgcacaggttcaagccacatggggtccaggactgagagggaggagcagacacaggttcccaggcctaagcaagaagcaattcacaattgacatctgctgggaaaatgcaaatcagttttctccaatggagtatcactgaccttctcaactacgctcagagcaggccccacgtttagacgtagttggccagcacaaaatgaactccatgttttgttttgtttttatggggtttctgcttcattttgttttgtctttcttttgtttttgtttgttttgacagttttgtttttaatttgagagagagagagagagagagacagacagagacagaaacagagacagagacacacacacagagagagagagagatgagaatatgaagatgtgtagataggacctaggaggagctgggggaggggaaacatgatcaaaacaaagtgtataaaaacattttaaaataaaaacattaaaaataaaacaatcagtcaaaggaggcagtggcgtctggagcataggacggaagagtcgatatatattatgtccaggcacccgtgtgtatggaagtggatgaaactacatagaagggggtgtggtctgtgatttccagtttgatgtttttattaatggttcttgaggaattgtctttgggccaatggcattggcagcatctgcagacacaccagggattcaatgctggtacaccactctagattcccagaagcttaactccaagaaaggagccaaggatatgttctgtgcagccttccaggctatccagatgcatactcaggttcaatgccattgcccaacaccagcaatagtgtagttatcttttatctcatccatgagggagacatcagtcagggagagacctagcatcgtgtcactgggatgagagttttcagcacaaaggtcaacaagagcatcaggtgttctcaggtggaataaatcaaccgaagaacacccacgtagaattacccggcaaatgaatgctgcttgctccactgatgggaaacaatgacagccctgtgtcacatttctccagtttggggaaattctaaaaagcacacttttgggatcagtcatgatctcaccaactgttggccccaaacagaacgatgaagcccagtgagagtctgagaacagaaggtccttttagctgtcattcctgccccaacatggagtccaggcgtctaggtggccatggcagagtgtttgtgcctttcctgcactatcatgctccccgagacccatatcctaaggcaccccagatcttccagcccttcacagagttgcatgtagctgcgttgtagctagcgcaaagtaaaattgttagtttcgggcagctgtgcaggaacagtctttcgagcacagctaaggtttgtctgtgggcattctatgtgggcattctggcctctgtgcctgccatggccctggttttgtaatgttgggtttttctgggtcttttgtgctcaaaccagcagttggatgtgagtatctggaagcttcctctgcagcagcctattgttgtctgtctcatttcagaacccctgagtcactcagagagaaatgatctttcttatgcaagagataagtctctttgctctcccaagtgtaaaaatagaaaaaaaaatcaccactcctggacgcaatagtaacagggcctttatatttttctttagcttattttaaaagtgtgtgtgtgtgtgtgtgtgtgtgtgtgtgtgtgtgtgtgtgtgtttgtatgtgtgtgggagagagagaaagagacggagagagagagagctctgatatctatggaggccagagagggtgtcagatcccctggagatgcagttacaggcaattgtgagtttgcctgatgtgggtgctgggaacttaactggtgtcccctagaagagcagtatgagccattcagtgctgagacatccctctagccctcaggatcttagaaatatttatgaaaaatcagttcacaaatgatccaggttatcaatgtcatcaacttaccaaagtatcaatttattacaaaaaacaacacaattaaacacgttcttgctcattatataggaaaactccatataagttaatcaaagggaaatttgaatccagggagggaagagtcagttgaattatcttgatgaccaatgtaatcaagagatacagggaaagaagaactcttattcactgatgaagtgatagcaagctagtcagttgttatagaagtcagtgtggagactgatgaagacgttaaaaacatgaccaggtgacacagctacccattctgggaatgtaccccaaagtctttctcctgacccttgcacgtttgttgattttacattgctcgcaacagcaaggaaatggaaccagcttacatgtccatcagcgaataaatggataatgaaaatatgacacatatgtacatatgatttatatgtacacacacagcagggttatactgagatgtaaagaaaaatgaagtttacaggaaaattgatggaaaacattatattaagagagccaacaatacctcaaaagacagatagctcacattctctctcgtaagtggaccctagctttcaaagtttacatatatgtacatatgtgggtgagtatgtgtataggctaggaaggagaccagggaggagaaaagaggtgttgcggtgtatggagtggagctacagaacccatgagatatgtgagcagaaagacagctaccggggtagaaggtggataaaataacaaaatgattttttgtttgaaaatgccagaatgagatcaatatcattttaacacaccactttgccaacagtggttgtcctgcagtgtgctaacaaagtcatgcttgtgcgagttgctttggtcacagtccagtccctgtagactatctcacagaatggccaggctgagggagagaggttagcttttctctggggcaacatggcctgtcttcctggctttatggggaaggtgtcctgctgagatcctcccttgatatgccccacaacggcctgcaggtgttaatcaagacacctgcaaagtcttgtcaacacgcaacagtgactttaataacctgcagctggaatgatcccaggccttgggagaaggctgcagggtcacatctgggagggatctcaaagtcggggcagacccaaaagactcaccctcaggcaatggttagccactaaatgtacattcctagggggctctgatccttgccagagcttagcacagactccttacaccttggtgatcaaaatccagggttagttctctcattccctctctgcaggttcacctaactggctcacagtcacctcgaacaactcaatgaggaacatgaagggctttgtgggggacaccagccagaaggttggaaggaaaaaacattcctctagggtcagaggggaagagggatggagggaaagagggagggagggaaggagggagggagggagggagggaaggagggagggagggatatactcaatgaggatcttttgtgctttatgtgggtattagcaagaaggctggaaggaaaagagatacttacagggtcccagggagagagagagaagaggatgtgtgcacacatgcaaacacacacaggcacatggtaagaggaaaaggagggaggggagaagagagggagagggagggggaggggaagagagagagagagagagagagagagagagagagagagagagagagagagagagagagagagatatgatttaggcaaatggcaaatgcaaaatgttgccagggaattttcagatcctttactgagctgggctcaggagaaaaccatttaacgttttgttttgctgtgtgcttgtctgaggtgagcagagcctacagggaggttgggccctatcagagtgtgcctcctgagaaaggtcacatctattgtttagctgttactacatgcgctagggcttccatagtaaaattctgcaaatcgtgtgactttaataacagaatactccattccatggtgaggatgccacaagtctgagatcaaggtgtcagcaggtccatcccttctggggacagccagggaggatttgtcccatgccctttctctcagttctaatggcttgctagtagtctctggcattctgtggtgtgggtccatggcctgacctctgttcccatgctcatgggactttctctttttatgtaagtctgtttctatgttcacatttctcattttggtaatgacatcagtcctactgtgttagagcgctgcgtaatgatctagtttaattcaatcatctccactggcatcctatttctgaagaaaagtgtggcctaaagtattggaggttaataattttgtgactcaacccatcccatagaattcccatttcatattgtcttgggtaagatggagtgcctttgttcagtttgccattgctggaaaggggatctttttatttaggttgaagatgaggtgagttggtgaagtcagttgagctttttgaagatggctggtgaaccatctcttctctaagatgatctggggataatggctgtgacactcgacgtcaagaggtggaatcgagttccctccttctcagtcatggcccccagtacacaatataaatcctgttctgagaatctggaattcttcatgagaagtctttcactgatctcttcatgacttgactccatctaaaaatggcctccctggggggatgcattcctgtggggaggctcagagctcctatggaagaaccaagacccctcagcagagcttgcagaggactggaagcatcaactcccagccttctaaggtgtctctatgcatccttccagatgagccttgagagctcagcccaagccacagtgatttcaacaacccctgagttgttgacaactcacaactgtgatgactttgttagggcttcctaactgagacagctgtggtgctgagacccagtcagaccacagaacctccaagagataatactgcattttcatcccaagtcataaattcttgggatttttcacagagaaattaatggaagaattgaaggaaagggttctccgtttccccagctctgtctctaatattccttaagatcattctgcattgctgttttgaaaagcattttcacattccatgtgtttgaaaaggtaaatcaagagaaaatctgttttctagaaacttccctactttaaccaaatgactcactaagctttcaatgaaggtttcttaggatatatatatatatatatatatatatatatatatatatattctccaataatcttaataaaatgaatgcaaatatctacttggtagtatcattttggaaggctcagtacttgtgtgaaattttattaatttatttcttgtggattgtaatagactcctaaacctaagcctccaaaagccatgaaccccagaccttaaatctagctggggaactgtcttcgcatttctcaaagccaaagatggaaaaagtagctcactctctctcacacacataattttaatagtttgggaactctttcatatggtaccgagttgagtgctgctaagaagtcttaagttgacatgaggtactcatgacattcttgtggcatagcgtacaatttcaatacatgtatccaacgagcaatggtcaaatcaaagcacaaacacacctaacatctgtaacatgtatcatttcctttccatgttaagagcacccagtagcctcctgttttgttcataaatgcttgttgatgacaggtgccccagtgtggtgtggaacactagcatgctttttcctttggttcttgttaaacacctctgtctacccacccttctccctccactgtccattcttggctcactatttctatcaaggcatcatctctagtttctacacactatggaatcaccagctgcttgctcttctttgtgtgcctggcccattgcacaggatataatgtcctctgggctcaggtgttttgttttctttatgcgttcatctgctgatgggcgcattggctcttatgaatagtgtgaccaggcagaaaatgtgtccctttgacactctgtttccatctcttttaagtatatatccagatataggattgctggatcatgtgatggaggtattttaatgatctgaataacttttgtgctgtgctgttttccatcatggctccactaatttacattcccagcaagctgggatcagtttctctttctccacgtcctcatcagtggttacttcttcatttctcattgacagccacctgtgcgtgagatggcatgtaactgtgatttgcatttgtatttccctgaggactagtgacacagagcactttccacatacttggacattttcttctctttgtagaaaaatgtccattcatacaactttccccttcttaaaaaattagatttttgctttaggtgtcgactggtttgaattccttgcatatttcagacactacttccttgatgagttggtggattgcaaacatattctctttctgtgggttgtgtctttactctgttgttgctttggctttgcaaaaggttttttgtttgtttgtttcattcctgtgctttaaaatgggaatatttgattatttgctatttattccattatgaatcttaatgtaagtttttatgcgttcaccaggagctggaggtggggaggggagaaagaaagagatagtgggggggatgctgatgtacatacctttcagttttatcaatgctgaggcatttggggtacacttagccacggcaggcagctttaacatgccattttggtatgtgttctgaggaggcacagattcatggcatgcatttacagagatcttgcttgacacagggtttctaaattactaagctacggagtgagggggaactattaggtaatttatacttcaagtataagacactaatctctgtttaactgctggcttagttaaatcatgattttttttataaaatgggatttaatttataattgaattagcaggaggatttacaaagtaacacacagtaatcaaattatgtgtccagaaagaatcattcccaaaatgtggttcagcccctacatacagagtgatattgttaaagataacttagagtctttagcctgaaggtgatgagtcactgaaaagtgggcagccctgcctcaaaggcttgggtagaagaggagtaagagcaagggaggagagtgggcgagagaagagccccgaggacagggcagacggaagaactgcacagctgtcagcaatggtataaaaagcaaagcccagacctggagtttatagatctgaacttagctggagatgtacgaggggctagaatgaggcttaggagtgccacgtgatcgtcttaactgaattcagcttcctaatcctcccttaagccgggatcttaaatcaatcaagcaattgatggaccaacagaaaataaattaattcattcttcactgtatttttattgagcactgatttagctctaggctcatggccaggcttgggaatgacactgtggggaaaacacagacctgctctgccctcctccactgtccagcctaggagaagtttcaaacaaacacacaaaaaaacgtgaagctggaactgcgtttagttctttcaagaaaggcttatatctgtctatgaaaatgtcacaaagattcaaaacagccaagggacgtagatggctgtggctattcggtgacacatggcttcaaaaattgctcagttagagatagctaagtgaagggagaggaaaggaaggatgctccagatgatagagcaggatcaggtctagctctgtggagggagaaattggtgcaggcagtctgaaggccaactcctggggttgggctcaccacagccttacctcagtagagactcccgtctcactgtcaactttatacttgacctggggcttttacgagcaagaggggtattcctccaactgcttctaagcttggaggtgtgaggaaacccaggaatggcgttgtgtaggggctgcagtggctgaaacagagatgcaaaggcctcgtctgagagcagggagtttggaagtccgggaggggtgtggaggtggggaagtgacagaaggtgaacagggacaggcaacagggtgctctggtgatgggggagtccacgctgaccttccaggcacaagtgaatgagtcttcagtatcacttcacagtgtgctatcatccttgccctgcagcgacggctttcacttgccttgatttatataggtgtgcatttggtaactttccccaattacttttaattcctcatggcactatctataggatttgatatatgctctaacaattgcttatagtcttgcatagcggtgttctctgtctccctccctctctttctccgtgtgtgtgtgtgtgtgtgtgtgtgtgtgtgtgtgtgtgtgtgtgtttatgcatttttaatggtggcattttttttttttttttagaaagaatctgagtgactcagggcagccttgactttgtgtgattttttttttgattcatggtttaaggggatccagtccatcataccagtcaaggcatggcagtgggaaccagctcacacctggcggaactggaagtagagagtgatggggcaaagctttaggctgcactataaccctccaggcccatcccccaatgatccagttccccactctaggcctcactttctgggtagactccatagtgccctagaatggtgtcattatctaaggaccaagtgtccaaacctgttaatctgtaggggaacattttatatacaaaccatagcagcacccatcacatccatcatgagagatgcacccttgattgactccttgacccaccaaatctcagatggatgttctttgcatcagtcagcaaataggatttgagtttatgtaaatttagtccctggtttaatggtctagatggctcgtgtgccgttcactgtgcattggaatcccaatggactgtagacgtgatgtgaccaaatgccccaagctccttccactgagctttctcagtcataatggactgaaaccttgaactgtgagccatagtaaactcttgcttaagttgtttttgtcaggtgtttgtcctagaggattctgcccagatggaggacacaggtaagggaaggagcatcacagcacaaggacaagatactaaggaggggctggaggggctggggggccggggggttgggggaatccagctcagagaaggctccagccacccaggtcaagtggtctattatacacagctgtctgtcgcttctgtgttgggtgctgggcctgaagtcagccaggcaggcagctgggatggacttagtgggaagtggatgaaaatgggacacccaggaagacagatgcacccccttcatgcttccttcaggccacacacgaggtgtagggtgagccacagcacagttatggaagtcagaggccaactttgtgaagttgtttttctctctccacctttacaaaggtctggggattctactcaggtcatgagggttatgtaggagtattttacctgctgagccttaagctcccagcgtcacacagctccacacctttgttactctgacaaatgttaaagaaacattttactttaattaaaaaattctgattgtacctatcaatatgctattaactttattatataattgccaaccatgaaagtttcaattttttgaattattcaattgtattccttgcctgtttttctactgagatatctgtcctttcataaccctttttgttcctttttttagtttcatgaacttgagtgacctataaataaaaacatcacacccacagactatgaccaaacttaaggtctctacagctcaagggacttcagtatagataggacagacatggggaaaggaaatatgaagctttgtgtttgcttgtcaaaccctttacttgattatcaactaatagtcatgttttcctggtgtatcaaaatatcgaatcataatgacatttattcacatctatctgttctcagatattgaggcagcctttcaccatactactcttgtttttaatgccttttcctttgagcactttagtctcctgatagctctgtatttaaaatttttctatttggatatttttttcttgctaagctgggtcccacagcctaccaagtccagggcttgagtgcttgtggggaaggttgagttggggaggtgaagatgtgtttgggaggcaagactggagaggagacaggtaagagaaaagagctataaattggcgttcatttgtttgcttgtttgtttgaatgccctgtgactgcgagcaactttgctgggggatgttcttttctcttcctggcaatcttctgtggtaatatctgactaagcagttgatttgacagtgaagtttcagggctggcttcttgagagacccataaaagttctagtttgtgattaatgaaaaatgaatgttttaaactcattatcaagagacatgtaagctgggaacactttctggcacaaggaaggggaccagcacagcatgcaacacaggactgatgtgtctgtgaagagcatctctgacacaatgagagaggatgtgacgtcacaaatgacagatgagccacctagaacacaagcatgtgtatatagagagagaatgagaaaggagagagaaactgacagagaggggagacaaaagagagagtgggggagacaagagagagagagaaagagaggacacaagaaaaagatgcagggagacaagaaaaagtctttgaataacaattttctgttttgaacacataaccatacataaatatatgagaatgtattcatataaagtaatacatgtttcttcatatatgcgtataactataaaccctgtatacacatgatcataattatataggcatatttttctttaagcaagaaataatacatatattcttttccacctatgggacaccaacacaaatatgcatgttttaggtcacagatcagtcttctaagtgtccccgaatatcgtatctcaccaaattcagaaacaaacacaaaaagatatccaactgttttcctcaaggcaccaacatcatttacttgtaaatttaaaaaatcgtaaacaaaaaggaaattaaaaatgaaaatttaaaaatgttgagagccaaaagaaaacaaatggagtttctaataactatgggaacaatgccaaaataattctttggaagacatttataaggggaaaatagcaaatgaacttgtattttagaaaggaggaaaaacaaacaataaaaataactgtgaaggattatgaagaaaaccgagcaaagctgggagcaggagatgtggtcctcccagggaggagcacagcaattggctgtccagtgctaaatgctcacacaagtaacattatatggactcaatagctatatttagggatatatatgcaataacgattaatgggaaaaagaagtcataaaattgaaagagagtagggaggggtataggggttggttgggaaggaggaaggggagaaatgttgtaattaaattacaaactcaaaaatcaacaaaaaagaaaaccacaaagataggtgagatattaaagtcaagtcaaaatagaatcagcccataactacagcatttgctgtgaccacacagctgtgtgtcctcctctgcatgaccctgccacctctccttgctccagagacgctagtccccagggaactgtccgtgtgaaaatccccgtctcaaacccacactgcagatttcacgatctgctccagctcatctcaaataagcaatgtatcaggatgagaagacagattacagctgttattccagggtctaagaaagcagcgagggagaggtgggatggatatggctagctggattatgacttagttgagttcctgcacaaacaatttcctgcacagggtaagtccaattgacagtgaattaaatatctcaaagtaatagaaaggactttgaatggccccagtgcatagatatgataaattgaacaagctgatgacaagggtcaattagttttatctgatcctagatatatgtcattgctatgccatttaaatatacaatatataaaataatcatacaggtgtataggtatatattctttgtaaaaagatgaaagctcaactcactaggcaaaataaaactggtggttttcttttagtgggtcaaaatcacagagaagatatgattgataaaagtctctttcactgttgcaccggagtgtctcccaggcaggctgctgttgtgggtcacagggttgggagctgggtgacactggtggttaccctttcctccagtagcatgcagagtaccttccagaatcaagaacactagtcagtaggggtgaagcttctagctggacatcagccagccttttccatgtttgaagacgtaagtgttttcctcagcaatagggccttaccatctggtggtggagactaaccaatagccctggcctttgatgtttgagtgaatccgtggtacccttgtggtcaatgactcaagatgtaacccatccctggaactggaggttttacttggtagcatatgttgtctagttggggcctagtctcctcctttttgtgcaaatccatttaaattcctttcatatatgtatatattttgggacccttctgtcatagtatgtttccatgcagtttccaaaagaccttaactgaaaaggtataaagccttaaaaataaacaaaatatcaaaaataaagtttaaaagctaaccgaatacatctaatctttatgaggaaatcataaaaagtgtttgttgaaagacactggggatggtctggagggcaattttagagatgtcccaaactttgtcatgattgggagtgacagtttgtcagataattctagaacatctcttagggagtaaaataaagaaaagcattgatgcaatctaaaatactttattgcaacttttggcacattcttttacttttcttctcttcattttgccaaagagctgaactcttacatttaagtttctctttgactttcttatgtcaattgtagtcagactcatggaagtgtcttattgtccatttttattttatttgaagtggaactagtggtttgaagaatgggtgcagcaatccaaaagtggacttgtagagtttcataatttgtttgtgccaatagttgacaaatttctcgctgacatcgagttttagcaagttccttccttatgccttttgagggccttccatgtagctttggttggagcaatgactgtctttttgcatgttgttagtttgtgtaatatccaattaaattacatccttttatgagccagtgcatacgagtcttgaaactgtatgtgagtgttcagtttgctctatgagaagtcaaatatgtgggtgttttattaatttaccggagagagtgtcaccatacagtgtctatcggtggctgcattagaaataattttgtatggggaagtttggccccatattataaagatgtcatttcttttaaaattacctagtaaattaatgtggtcaatagaattgtcatagaatctcataaaatggtcctcaaatgttgggcatcttcctcaactaatttccactttagttaggaagacagagtctctcactgaacctggacctcacagattggacttctggccattgagtgaggtgtagggaccggactgccacggcttccccagggctggcttccagcatctactcctgtcccctacttttggatgtggtattcgggatcgaaagacaggtgtttgtgcttccacaacaggctctttaccaaaaaatctgcctctccatgcctaggctggactttgggggccttggcatggtcggctcagcatgccagcgaggtgcctgtttcagctctcatacccccctgtttccagggtgggccagtgatttctgctgattggtttatgatttctgtgtatgacttttatgcagcgctgccttccccatcaatcttcgtgcagttcggcgccttccttgtgcttacctcagtgtggaagtgtcacaggagcttacaatgatctgaaggtacacacatttcccctcttcttataaacaggattttggccttaactcagcatttcccaaaatacatgtgtgtccaaattacctagaaatcttattaaaatgcaggttgtgggagcttcatgaagctcagtccatgaagcacttgagttcaattcccagaacccccttaaaggtctatgtgtggtggttgcacacttgtaattgcagtgctgacaaagtggacacaggaagctccccagggctcactgcccatccagcctatcatactaagtgagttctaggtcactgagaaaagaaagtttatctctatatacatatacatacatacatacatacatacatacatacatacacatacatacatacatacatacatatgaaaagtgccctgaaaagttggccttcagctctgcatatatgtgcacacacatgtatgtgtgcagacatctgtacacaggcactcccacaaacttgtgaacacacacacacacacacacacacacacacacacacacacacacacacacattctaattcagtgggactcatgtgcgacctgagagtctgcatttctagcaagctcccaggctcgtgatgcctctcacttaagccctgaggcttctttgggcactcaagatccagaatggcgtggctgatcttgctcttgcagaggggaacccttaaccattattgccagtacttctcaactctggcttcccattagaaccacacggggaagttttaaagctttctacagcccagatccgaccctgggggtttctaatttaattagcttggatggaagcctgaacattcgaaggttttcaagcttgactgcgtcccttggactgtgagcgggaagtctttgaagactcgaggtccccttactgctcccaagtccatctccgaccccatggactgtaaccctttaatagaagttgcttgagtaaattaacttcttgctcttggcctaggttcagtattcctaagatgtttccagctcttcagggtgggcgttttcttttctttttttttttaagaagggaaggtggtgctggaaatgacacatttatgaggtgacaaagtcaagggtgagcatgttgggggccctgaattagggggtaagccaaccctggtgacatcttatggttcagactgggtggcagagaggccaaactaagggtgtcagctcttttaaagttactgcaagaaaaaactttggcccaatatattttaaggagttccctttaatagctcttccaacaagggtaaatttaaattaagcatcttattgtttagtgcgcttattattttaaaataggcaatgaatatgtaagtagggcacagagctgattggagaccccacatttcagcaaaggactgttgggagcatctcctgacttcgaagcagagttttgtctcagacaatgaactcttgagtgctggaaggtcagtcagacctctgagaaggaattaacaattaacaaacaaaggagcagcctgtcaagccccatggtgcctgcggagaatattgagcagctgaagaatcgggttgtaacatgggcctagagtcaaatggcttctagaaagacaggctgaggcagatctggctgcagtctaggggttggaggcagaagcacggtagaccctgcgtgactggctcgaggcagcctagtgctaacttttgagcagttctatgagctagttttcaaacacagccatctttaaaaattaaatcataaaagtttatggtcaaattatttggtcagattatttgggaacaaactagtgaacacttgacccccattatttcttaattcattcaccaagctttgctgttttataagtgatggagagtcattatgcttgtaaccacggggtaatgaaaacacttgtagttataactattgatgtcttcctcctttttctgctttccatgctgctgtagtgaaagcttggcaagctagaccataagaattgacctctgggtctgggggtgtagctcggttggtagagctccctttgagtagcatccatttagtacatagtatgaaactagatgtgacagtgctgtccggtacttgggaggcagaggcaggtggatttgaagttcaaggtcatccagggctacatagtgactcttaggggacagcctgaactacgtgtctaagaagaaaaaacaaaagaattaatgttatacaaattactcattggtttgttgatttgatagtttttaaaagtgaggaaggagctgaaaagatggctcagtggttaaaatcgcttgctgtctgagagggagcagagttcagttcccaccacccacatcaggcagctcacgcaacctgctggaatgtcggctccagaggattccacacccccttaagcctctgatgaccctggagtttaagtgcttgtgcgcacacacaaataacaattttttaaagtcatgggaaatgtcagtaatttgtattaaatgagaactgatgaattcatattaaatgtgtgtgagggctggggtatagtgaatcgttcctttcctgcatatgaacagctctgggctcagtctcaagcaggacaaaaggggggaggaattagttgttacataatacttaggaaaaaaaagtctttcacgatttgagagctctctgaggatacaggattagtttatttgtgctgttccgggtggtgtgtgggctgtgaaaggactcatggagtcttgttcaaagcctctgggcagacagattccaaaattcagaatttgggagtcttggagtggtcacatggaacaggcatagcgtgttataatccgcagtgaagtcagatgcagtgacctgtgacggaactcgtgcattataaaaagtaggaaatcaagaagttttctcactagactgtccaaggaagaacgggatgtgtggtattggttcaagtcacattttattgctaaatggatggaggtcaagtattctcaactggatgaggaacgaagacagaaacctgtggtgtggaaaccaagtcaggagctgtgactctgtatggactggctggtccacaactagccatggtggacagtctgtgttgggtcacatgacatgtttggctacacaggcctttagtctagcccctcccacaactgcccatcttctctttggaagactttgtttttgtttttaaaagatttattttattcgtgtgtgtgtgtgtgtgtgtgtgtgtgtgtgtgtgtgtgtgtgtgagagagagagagagagagagagagagagagagagagagagagagagagagagagagaatccatccatgaaattcagaaatgggcatcagattccctagacctggtgttatagtcatctgtgagcctatataatctggtatgagtgttgggatctgaactctagacttctgacagaacagcaagctctcttacccactgagtcatctctccagccctcactgggagacttctggagagaacacctgggtacacattccccactgatagtgttcagcagaactttgccacctccccttcccaggagtcaaggaagcaggcctgagattttaggagactccaaaggaaccatgctctggggttagctggcctagcctgtagaaagaagtgtagtggctcacaggaagaactcacagctttgctagaaaactggctgtgtgggctatcccctagggctttgcaaaatgttaattatgagtcttaggaatgaccaaatatacttagaggctcgctcaaatgataaaccaagactcagccaggagtttcagggaatgggggatctcaaaatcaaccatgatggctcatggctgtaatcctggctcttgggaatctgaggtgggagagtgccatgatttcaaagctaagcatgggctacatagtgagtccagaccagctataaaataagatcttgtctttaaaaacagcttccaaagcccataaacatctaacaaaacctgagtgtcttgtccaagaagctggggagatagctttgctgggctcctccattctccacctgtcattgctacatccccaaccaggccctgtgttcagagacaatgtgaagagacagtctgttgaagatctcacatagttttacaacaatgaaatgccctcaggtaggtcaacatgaggattcctattgcaaggatacaaatatagaaggaagctacacactccatgacaaacctttactgcctcctgctttatctcttaactttaaattcattcccctaaaatattgattttatcaacaaagagtagactttccagagacattttcaaaaatggatgccccgaaaggctgattcatacatacttgctctcaggtgtcagggacctcagaagttgcctgggtttgagaagcatgggttttatgtcttctcacaagttgtctttcaaggtggacctcaggtaccatatagacaactgtcgcctgcttcatcagcatctctgaactagatcatgtacatacagatcatggctgccgtagaaaagggtttgaaggaaccccatgagttcttgtttggaagccgaagtccctaacagttgaaggacttccttaaggctacaggagcatctttgaacctgacaggtcacgcagaatggacaggagcacacacagcatcatgcatccgttagctaccttcctttccttcccgtgacctttggagagcttcaaggcagttgtgcatctacacaaaaggcaaactgagacaaatacttctccaatgctgctgagctgctggagccctttaaacactgtgcagtaggtttaaaacattctcactagttacttgactttgggatcagaccaagcaacttgtctgcacacgtgtcttgtgtacccttcttagaggcttcggaacagaaactggaaagcagtcccttctaattttaggaaactagtgctggaactgggggtgtagctcagggtagagcttgcctaacatgaaggaagttctgggttcaacccccaggaccacataaaccgggcatggcagagcaaacttgagattctgtcacttagaaggtggaaaaaagagggtcaaaagttccaggctgctctctgccacatagtgaggtgaggtcaggctcagaaatatgaaagcatgttaggaaggtgtgaagaaagggagggagggaggaaaggaggaagggagggagggaaaaagagagtaagctagagagatggcttagtggttaagagttcttactgttcttgcagaaaacctggttcagttcccatggaggaactggagtctgtaactccagtttcatgggattgatgcctcttctaacccttgaggacactgcaggcatgtgatacacactccacacacacacagacacagacagacagacagacagacagacagacagacacacacacacacacacacacacacacacacacacacacacacacacacaaaacaaatatgtttttaaaagaaagggaacaagaatggccaaaggagggaaggagaaaaaggaaaccagagatcacaggaacttaatggtcattaattaatttaggaaaacagtattttatagtatatcttaatttcaaagccatcttctcacttgctttgacaagttaaggacagcacccaagatgtagggtagatcatgggaaaactgctctttttctttcactttaagcctgtatgacaaaggactaatttcatagaatttgacagagggagattggtaaaccttggatgttaatttccaatactaggtggcttgggatgaagggataggagggaattgagccctatttagatttttcatgacatcttttaaagttgaaaagaaacctaggataaagcagttctctctctctctctctctctctctctctctctctctctctctctctctctcgatttaagatgtttaaagagagtttaagcacccaaggcaaacacgattgctttttgactcccagtaatgttttaggcaggcgcagaaggggaagtctctgcacctttgcagttttcctgactgacaaaggaggcctgttcagggatgggaagagcattgacctccattcgccctcagtcatagcctgtgatcatgtcgtaccaactctgccggtgagcaccaacaaatacaattaactctctgagagtttgtcagacatctggacctttggcactgcaatcaaaacatctggacatttgtttgagtgctcttctggctttccaagttttgatagagtgtcacagtcctcatagggagcgagtgtgtcctatggggcagagccaggctaatggtttcccctgcgtttgcctgcttcagcctcaccagatccaaaagttctttgcagtgatcaaccctttcctctagaagagcttgggctcagcggaaaaccccacctgcctgagtgcaaaccctgggctgctcactctgcctcttgtcactcaaccacagagggtcagggggacaaatagcatcaatgtggtatggaattgcaccattgaaagaaagagagaaggcccaggacccaagttcataatattgctcaataatgtcatcattgttagccaagttgggaatatatccctgtcagttactctgattgttgacataaatgtcttcaacttcagttgagattgtgtatctcaaattttccatgtttgggattagcaaaaaagctagaaatacttgcacctgctttgtccggtaaactcattttaacaatgagctgcctatgctggcatacacatggaatcctaccactcaggaggctcaggccggaggatcacatgttggaggccagcctgagctacctagtaagatgaaataaaaatgaaggaatcaaaacaggaaagttcagataatgcttggtgcctgggtcagtctgcaccctctcattcattagtcagtggtttcagttttagctctgtagccttgaactatctacacacgcctctatgcctctgtttccttccctttaagacaccagaaatattcaccacctttcttcctttttgccaaagattggataaaattatgcttggatatagcttggcagactgtcgcttactgctgtcatatttgccaccacctaagttagcaggcgatggcctgggaggttgcgccaccagaggcttgctcctgccagagagggccaggggagatcagagaaactccattcagtgtccgtcatttctcctcacttacatgtctttatagtctaagcagcagcttcccttcctctattacttctgccccctgctggccggggaggggaacactgggtgccagaggtgaggtgcaagttgcctcttcctacctcttcttgcaggtctctttgtcaggtcctcgagtttcctaaaatattaaagctgaataagtgtaggcgcctataaaaagacgagagggcatgaatacgatcattgcctccttagtactgtaaaattttacggttatgtaggaactcaatgttaaaataaaaagccacgaggaaattcctctggataaataattagttatgcccagagacagatcgtaggggcaatgggtttcttttccctctctgtctttttttgacttttcagtgtagacagatggtttacccatcttcagtatcctgggctttttggagaagtgttatataacctccatgcagtcaccaaatgaaataagaaattcctcgtttggcagacagagctcgaatatagagttcataaactttaagaacgctcccaagtccaaaatcagagacaacctgctccaagtcagctcccatttgcacttaattagggagtgtgttttggaggtcactgaaaaccagcagagtatgttttcataataactttcctcacaataaaattatttgggaggcagctgtccaactttttctggaatgagggcaagaaaaatgaggacacggagtgaagttattggataccttatctgggactgcccaaagtgttgtctgggatccaaagaacacacagtaccttctggattaggggagaggagccaagtgcttttatagtctcaacaattttcttaactgtgcaatttcgctttattgctaacaagtaaatgaaacagttttgaggatttcaaatactggagaacaaaagccttcctggagttgtaatcatgtcattctcctggaagggaggcaggaagggcttgggttgaggaggacatgagtgtggggtttggagaaagcagttggcaggccacacaggtaaagaggcttatatgcgtatgctgtgtgcacctgagctactcaaaggtaacacaagtgtcaaaccactgggcgtcactgcgtcggaggacagtgttttatgtaatactgtccttcattcagagccccagagaatgaggagacaaattctaaatcacaatctttgcaaatcagaaggagcacattttctaataatccaaacaaccaaatgctaacaacgtaagttctaggtacctatttaaaagttttattaaaatttttcatatattttgatcatattttcccctccttagttcttcccacaccctacctacctaccaacttcttctttctcaatgtctctaaaatgacaagaacaaaaccaaaaaatgcaaaatcaaaacaaacaaaaacccaaataatacacacaaaaaatgccaaaatggacccccaaaaaagcattccccccaaacccaccatgcccattttatgttttggtcaactgctcatagccccagggcctgcctggagtgtgcttgatagatccagtgacactaatcttccctctcccagcaggcatcagttacgaagagcttcttggttaggagtgcaaccctgtgtccttttcccctctcagctgtgggtcctcatctggcttggacccgtgcagctcttgtgcatcctgtcacagcctctgcgagttcatgtgtgccttggtcctgttatgtctgaaagacactgtttcctcagagtaatccgccacctctggctcttagagtctgtgcactcccttttctatgcagctccatgagcagcagggaaggcaggcctttggtgaagacattccgtataagatggagtgccccaaagtctctctctcattgtgggtctccatgtcaatgctcttctactgcaagaagctgctctcatgaggttgagccatgttctgatctgtgggcacagcagtaggagtcattttatttctatgttcctttagtggagtaataatagttggcttccctctagggccatggcccattgagtctcaggttcttgtccactttggcagtgtcatgtgtgggttccatctcatagaatggtccttaaagatatttttaaagtattattttaacagcctgggctgtagagtagttctaggtcagcctggcctatattgggaacctacctcaaaatggcaaagttgaaaaataaaaaaaaaataaaataaaatgaaggaaggagggagagagggagggagggagggagggagagagagagagagagtgagagagagagagagagagagagagagagaaagaggctaacttctgaactgaatgatgtggtgtatgcctgtaagtccaatgcttgggaggtgtgaacaggaggatcagtagtttaaagccaacctctgctacgtagcaaattccaggccaacctgagctgtataaagtgactctacctccaccaatgaccctccccacacacaaaaatatctttttagatatttctaaattccatttggtttttgtaactcccattaattcagatagattcatagtttccaagttgaggctgaattattttttattatcagaggaagccggttgcttcaacatattgaaaagatttccatcctttctccaaggacttgtttaaccatcatttgtatacacccacacacatagacacacacacatagacacacacacacacacacacatagacacacacacacacacacacatagacacacacacacacacccacacacatagacacacacccacacacacacatagacacacacccacacacacatatagacacacacacacacacacacacacacacacacacacccacacacacatagacacacacacacacatagacacacacacacacacatagacacacacacacacacacacatagacacacacacacacacatagacacacacacacacatagacacacacacacacacacacacacacacacacacacacacacacacacacacacacacacacacacacacacacatacacacatatgcacactcacagacacacacacacacacagacatacacatataaacacacacacacacacacacacacacacacacacacactgaagtaaggtaagctacatcatgccatggtttctgttcagtgataaattgctctgatatggtcttgaggtttctaaacagagctctacttgcaggcagtccctgtgtcaagctgctgcatgcgctaggtgacccaaggactgatgtgaatgagccatgctttggaacaggcacaccatttctctttaacctctggatttgttggcttggataacaggaaatctgtcatgctttgtttccaaggcttggcagatcattttagatccttcacaaatcacctgtgtgtaagtccccctgagctcagcatagctggcactttgaatgccggtagaagttgcctggttttatatactaaccttgtgaagctctgctatgtctggatgccagctgctaagacacccctggtgctccctgcaccttggtgcccatgtccttgtgtatagttgctcctagatattcatgggggttggtttcaggatatccccattccaaaatctgtaggtgctcaagtctcccataaataaatgacacagtatttacatacaacctatgcacatccttttgtagtctatgtattgcttcgattgcttttaatatttaaaaccaatgctttattttgtactgtgttttaaattatgtgtatatgtgtatctgcacatgtgagggtaggtgctctcaggggccagaaggaggcatcagatacctggacctgtaagctgtcacacatggtgctaagaaccaaactccagtttttaaccatggagtcatctcttcatcatgcctgtttgtgttctttgatggaagaaaattttactctgtagcccaggctgtgatttttcaagggtgaaccaacacacacacacacacacacacacacacacacacacacacactcacacactcagcttaaaacaatgtacatgcttggcaaacagttgtcttgttgaggaacaatggcaagagaaaagtccatgtggtcagcacaggtgggtatttcttctcaaatactttctgtccatactggtttggtctgaggatgtggaactggcaggtacatatgagtgtcctctcatcctgccttcctcagcttgcctgagctctgtaagctacctgggaagagtcaggcggcagaaccatcagatgtctccatgaagattagggtaggacatgactatgattctgtcttggatgtgttccttcaaactctcttataatagtcaatgagcaaggagactgcccagcatccctgtggatgagtctagaagtagactttctcctactctagatcgagatggattcggccccagctgacaaaggcactgcagagatctggaggcagagttaagtccagatgagtcatgtccaaattgtgtcctcacagagccttcgagattggtgttcggtgaatgaaacattcaagtttgagggttacttgttatatggcaattgattactgatacacatgtgtacctctgttgatgcttaaatgtcacagagtgacgatttctatgcaaagtccctgattaactacacgggaccacattctttgtcaggaattataagctaggtacaataaagcaatgttgggggttatttgtttctacagttaatgaacacatcctttgtatatgtgtgttaccacagtgtctcattttacatgcaatttggctcactctccaaatcatgtaatgaactgtttggagtattttttttttttttttgtaatgatttctggtgacttttctacatccatgtttttggagcatttacaaaatgctgctgtttatagagccaggtcagattatccttctctgtcactttcatgatagggggattctggaggagggaagtacattgccttgtgtccattcatctgcccaaatgacaagggtgatccgagcatggacagccttaaatagtttgccgtgaaacagagtaactcaggggttaattctgttctttccaaaacaggttttcccatctttagaagttctaacaacaaatgtttcaaggtcagaaaggttcagatgaccagagcagagagcccaggaagaccattgtcatggccacattcaaacaatgctctttgtccccttctgcttcctctgaggtgcacagtactctccctgctctgtagctctcctaaggctgtctctgagactcggtggccttctatattaagaccgaaggatgctcaatgttgtttgttcttttctgaagactttgagagcagcagcttcctaggaagccttttgtctcagacatttgtccagttaaccaccgtctttcctcctgaaactaccttccccccaccatctctttctcttcacgtctccaccgctctcgatttgcccagaagcagatcagagcacacagagagagggaggggtcccacctgctctgaaagtgaatcagcttcttcaagcaagttctgctgggaaatgtagtatcttagattagacagtctttgttccctgaattccaggcacaagtattcttcccacaaggttgttagcacattgtgtcacacctaacacaatttggaccagagaaccgaatctggacagtaagctagatagatttctgatacacccatacagccggaagacatctctacaaatgaaacttacttttcttattccattttcccctggaaccatgctagccctgttattttctgcagtgactactggacaaatctgtgtggcaggttgtcattatggatagtttatttgaatttcccctggccctcagagcattggtatttctttcttggtttctctcaggttgaggagaacctggcttattggcagaaggcttttctgtgtcttctgtcacagcccctcttgtactggggtcacttaccttatcagcagtggagttttattacacattatttcagttttattacacattaaagctgcctcgaggtgtttacagacagatgttccttccagactgcacaaaatgtaaagtcacaccttccagatggaggaggagagcgttcatgtggtgatgaaggcaacagatgaagacaccattgctcctacccctccgcctctccccaccacatggaggtatggcttagtgtttcgatggttctttaagatctctgcaggatggggctggagagatgcctcacatttaagagcacttgctgctctttcagagaacacgagtttgtttccagctgcctctaaccccagttccagggtaaccaacacctgtactgaatgggtatatacacatgcgcgcgtgcgcgcatgcgcgcgcacgcacacaaacacagacacagacacagacacacacacacacacacacacacacacacacagttgaaaataattaaaatgagtcttaaaaacatctctccaggaacagtggcaggctgatccacagctcaaagacatttctacattttcaacaatggatagtgccactctgttcttcctgtgtgtctctgtgttaaatggcgtgctgcctcccagtacattgtgattgatagtgtgctccgaattgaaacattcttactgggtgatttataaattgtctttgagattcataatgaaaacaaccatttctagaaaagccaagtccaagatgaaaactcttattgaagatccatgttcaatatatacaatcaatataatattcaatacaatatagccagtgttattaatcagctcttaagtgacacttttcagttttttacttaaagcgagctctgaaacattagtgtaatccctttggctgtctgggtatccatttctacaactaggaaaatacaaggagctgacaattaagtcccttgtgtttcctacagtgtcaccccacacccgccagcttctgtgaccattgttctgatttggatggggtcagatagacgatcagaatccacagtagagccccagccttgagtcagccaacgggttcaatcatttcctcttcagcacggtcactggaatgactcaaaagaaaccccagagaccagatgagctcagttttcacttcctgttccaactgacttcacagggcttttatgagccattaaatgactaaggagaaaagagaaggagaatcaaaggccttcgtccattcacaaactgaataattaccaagtcattagtaaatcaaccctcatgccctgctagcttgtgcccagcttccgctcaggcagaatagctggagactacagctccttcacagagtggctttaaaccaccatcagcttggcaaggcccaggaggtgatggactccattctgtgagggtggtggaagttcaaagtagcccttctggccatgattccagtaccacaaatgactcaaacagagccacgcctctttacatcctgagttctggtgggaatgcatgtacacagttttctaactacgaggtggtgacagtgtcccaagtggcattgtcacacctgtggtcataaaagccgtttacacttatttattggttatggggtgaataggtactatgtgaactgaagagttttagtaccttgatctgactaaattaagaaactacaggtttattagctattttgttggctcactgaataaggagaaaacttcattaatactatataaaaagcaaggaaggtttttgtaataatatctagtctttgaggcaaacaccaccacccagactcttcctgattgaggaaatatgaattgttctttttagtttcatctttttctgacttcagaatcttcaagaaataacaaactcacattccacaaccttaaaagaattcattttaaagatagggtctcagtgtgcaccacagtctggcctcagagtcacccagatgtgactcctgatcctctctccactgctaagatcacaggtgtgtgacaccctgcctaacagactactgccatcttgaagaataattaattgatatttttctgatgtgtctttgtgaaaaaccaattacatctcatgccaatgaacccaagagttctcctaatgaaagctgctgggagggtttttcatcctgagtcctggttgtgtttctattgcagtgataaataccaccaccaaaaccagcttgggaaggaaggggtttcttacaggttacagtgtgtagtctctcatgaagggaagtcagggcaggagccacagggatcagagagcagtgatgcttattggcttgttctccatgacttgttcagcctgcttttttatagcacccaggattatctgccaagttgtggcactgcagtgggctgttccctctcacacagatcatcagccaagaaaatgccagaaagacctgctttcttgctaacttccgtgtgaaccattggttgaaaatcagaatcccctcattacagatggtgaaggcaaggctaagcccctagagcagcaattctcaaactgtgggtagtgacccctttgtgagtagaaatactctttcactgggggtcacatatcagatatcctgaatatctgatatttatgttacaattcataaaagtagaaaattacaattatgaagtggtagttaaagtaattctagggtgggggttatcacaacatgaggaactgtattaaagggtcacagcattgggaaggttgacaaccactgccccagagtcacagggctgtcagaacagcagtaacctaaggagagaaagcagggggactggcagagactgggagcagctcatatacacactatgtaaaccagtcatctttgcccatctaactcatgtgacccccagaaaagtcttttgggggctctcactcaattcttgagtttctttgggtagtttataccatcatttgttcactctacagttgttttaaaatgaccatatgtgtgtgacatatcaatgtttagttttagaaactgaaaaattattctgccctacctacctacaggttcattataaaggccagggaggcaggtacctatggttatcttctgcggtaaaatttactacataaaaacaaaataatggggcatattggtactgaagtttcaatatgaaacccttctggttcactcatttaaacagggccaaatttgtctttttatgcttgggcaattttgaatttctttctttcaaactataaaacatcaaagactttggcttatctctccacgtgctgctcctttaataagctctcatcatagtacgggttaatacaggacaaatgcattatggcctagatccgtgtgtgtgtgtgtgtgtgtgtgtgtgtgtgtgtgtgtgtgtgtgtgtgtgattttaagaaaataaatgtgtacctttgacctagctactacctgccttcaaacacttaaaaaggaatactgactcattaaccaaacaaggtctagaaaataattactcacttaacacaatcatagtgacttccttgctgtttccactccattgctgttgctgtgaagaaaaacaacacgctaaatggagacttaagggaccccatgggaccaattgatgccacgtgacttcctccctgccttccatgaaaataactacattataatggtctgtggtattaatatcagctttggaaaagtgaggcaatggctccatagggaaggaagtggcccaagcaagaactatggaatgtgcagtatttgaccagacacgaggccacattttttttttaaataagctgcaacatgtagttaaatgaagtaagggcaccaaatgggctagtgggttaattagggttaaaaggccacctgggtagtcgatctatgatctcaaacgccaagggtggggggtgtggttaacaggaaggagtttcagaaattaaagttctcaaaaatgaaaccttttccaaagcgtttctcccctccctgaatctttgcaggtctctaaccaccacagagcaggatgttctttgctggtctctgtttatgttggaattagacctgggatgggagtggtgggtacataccccaagtgcttctgtggcttgatgggtttttcctgtggcagtagaatgggcagagccagcaggcacgtgggccacgacactcatagcccagctcagagctcctccaaactgaaattatgggcagaagccccaccctgaccccatccatgctctctgtaaggttccagggagagttgatttctttcttgtggtgcatcaaattcttgtctcagtgtgtgcaaagggacagttgatggtttgggttctaaactgctgaggtgtttgaacaccatcaagggtggtccccaaactcataaaacataaagattctcctgggaacagatattagtggtatgcttaattatctaggagatgttgcctaaggcaattatctccatctaattcctggacagtggctgaaggtttgactagatgttcaaaggcttggaaagaataacatttgagaaggggtgatgggtaccttcagggcagatgctggatatactccttagtgtgagctcagagaatagactgtggctatcttcaagctcgtcaaaggctccactacggagacagctttacagagtcaaaaagacccaatgacctcttcaccccagagatgactttccttggtttgatcaaggggttcagaggtggtggcagagaggagggctctacaggaacctaggtaacaggcacttgtcagccgtagttaagtttttgttaggtaggagtagcagctagacctgaggaggaggaccctgacttaaaagagcttgccaactgataaattgactgtattgtagagtagaaggaatgcccatcacttggtacctgtgttatgcttgggttactccctggctacaactttcattggttaaaatttaaatacttcaacgtgccaaagtttaatctttccatgtgattgttttagaagtaccatggtcttatcagcattgacatttcatattgctgaaacaaaatatcactcagcagaaggactgtaccctttgaatcatgttttgagataaggcaatgaactaatgggtataggcttccctggcctaaccgtgtatccccactcaccatagcatgatggaaagatgatcttcaagactcacatatgctgtctgctggcagctcttggaaattggggaattttggttaagatgaagcattgaattgatggtgaaggaatggtaccttcctacctgctttaaaacacaaattcagggatgtgggtatgaaagacgggcatgttactatactgatcaaaagcttacattctgtccatgactctgcaggtctaatgggtttcagcactcagtagagaatgccttccaccctgagatgatatagtaggtctataaaatggagagctgaggcagcctcttggtcatccagggagtcacacaccactggaaacccaggaaaagagaagctgagttactatgctgggtcgatggaccctggtttctaaagctgaaaagaaggaagggcatggcaccccctcttccactgtcatttcaggcagctgagaggacccagagagcaaggactcagctgctggagcatgagtgtttaggtatatgttgccctactgtgtgctagctgggtcagagacaacaatgaatggctgtggaagaaaagttggggcacttgctgtggtctgggctgcctgcaggaaggactcgtgtgtgggctgtgtgccctctatttagtctcagatgtggaagttcagatggggttgaaataggatgagtagacgctggccaaagagcataggcatttgctggatgaaataatcacacaacttcgttccttctctattacagtgactgtgttttaagttatagaagatgggatcgttatactgaatgagaattatttggagaaagacaagtttgagagggagtgctgatgagggtgtaaagcatttaaggtggtagattccaatagactcaagtattcaaactaggaacattctttcttcaataggaaacccatgataggtgcgatcacaggacccaattttccactggggaaaaaggaaagcaggtcccaccctcttccccatttcctggactcagtgtatccacatggcttctaccagtcatgtctggtatgtgctctggacttaaaaacccagtgagaccggcaaaggccatggggcagtcctggagctgtctacaaagtcagaatccccagggtcaagagtgttgcaggcagtgtccagagatggtgaccagactccagtgcagttatgtgacagactcttccgtggatgctgggatttcacatatggactgatctaaaagctatgcaaacactgacaaccaccattcttgcaaaagaaccagtatcaagtcctgttattttagggatgccgtgtggctccagatggcatttattttgcctgaaagatgtctggtcactttgagttccatgccacactcttcaccaaacagtgatcactcccttgttcctttcctccatgtctccacgttctccatgtctgaggacatggcctgttttttcctttacgcggattgaagagactatacgaggaaatcatcatgatgaaggaaacaaaattatctttaaggttaatcccagctgttttggggagggaacaactagatcctccgacttgtcccacctggtggaaggacactgatgtacctcatgcagtgtctgagttatggcttgaatgtgaatttcctccctacacttgtgttttgaatgcttggtcctcagcagtggagttaatttgggaagttgtggaaagtctgggaagtgggttcaagcgagaggaagtaggtgaccaggaactctgctttggatgtcataccagatctctgggcccctttcctctctctgcatcctggctgtggcaaagtgagcagctctcttgcatcatttcctagggccaccatgatgccccacccaaacatgtggaccacacaaaggtggactgaatctgtgaaatcaagagcaaacagagctttgccctttagctgtctatgtcagatactttgtttcaacaataagagtaactaatgcagttacttcctggacctggtagtaaaagccaggatgctccaacggtcttcctcctgtaaaatccttccacttcttaaatgtgttatctccttagtgttctttacttgcacccacttaaactttccaacaaaagcacaggaactttggcagccttagaaccataaaggtagttttagacagcgactcagcaatttagcttagggctcttatccaggaaaggtccataaatgaaaaacattttctgtttttgaaagtttgttattactgttattattgtgtgtacacatgcaattcaaattggcttcttttcccatccttacttgggtcctgtggacaaaactaggatggccacatttatgataaacactgactcatcttctcagctccataaaaatatgtttagttgaaaaaagtctaactttctcatttaaattttttaattgaaggaggatttgttggccattggttttggaccaggtactaccctagtcattggggatttatatgtgaagagcacaaagagccttgtactttctttgtggatatgagtcataaacaaatttaaaacataaaaacggctttccaatggtggtgagctctcctgagggaaagtcagcaggggaaggtttggtggggatggcggtgctaggagcatggtaacctaagcaaaggcctctggatcagcagaatgaacagggagagaacactggacatggcgaggagaggctcagacctgccttgttagcactgtaaggattcaggcttttgagagcaggaagggatttgaagatttttaaaacaggtaatagtcttgcctggaaaatatgttcttccagtgcatgtaattgtctaaagttgaggtgacaatcagaaaatgttagttttaaaattctgagatcttcatatatgtgtatgcatttacataatttcctccttccttccccttcctccaattcctcctgtgtctccccctctcaaatcactggcctccttaaaaaaaaaaaaaaaaggttttgagcacgctcgtgcgcgcgcgcgcacacacacacacacacacacacacacacacacacacacacacacacgtcactcatgcacaacaagctgagttcctttagtgtatatatgtatatgattttagggcaaggcacttggcattgtgtaactgacaaggggctcactgtggtgatatattatttatgctttattaaagcttgcctgagggttcagaaagcaaagtcagccacaagacatagaaaccaggcacacacctttaatcccagcagccagaagctaggagatggtgtatgcacatttaatcctaggactcaggattaagaggtagtcagatctctctgagttcaaggccacccagcgatacacaagtttgaatcagtctaaaagagtaacatatcaccggcctttaatcccagcactagaggtgtataaaagatagaagcagggtcttcagtcttcaataggagacattggttctccagccacactgaagataggaaaggctcagtatcaagaaggataggaagacagtctcaggattctccaaccacgaggaggagaggcagcaggatcaaccctttcagcctgaggtagtggcccattgctttgcttttctgatcttcatcttgaagcttgaaccccaatatctgtctctgggtctttttatttatagtgttacagctcaccgccagggaaggctgattctccctcgctcagcagtcaacaattgcctgtagcttttcatctaagtgtgaggccttgtgagacttctctcatccatgttggcatgccaaccagtgttgtaaaaggacacagtatcagaaccagctacctcatcgtataataaatattatgtgttcacttcttatatttaactgagcatctgaatgttttaatcatctcaggttgcccccgtctcaagctgctagtaataagtgattattggagtctctttctgttggtttgactttttgaaatttcacatacaacagatagtgtggtatggcattcatcatcttgcctggcttacttcgtttattgcattttataggatcatttatgtttgcagatggtggcttgccttcttgtatacagctgaatggtgtctggttatataaccacgtgataccttctttatctgtttatcttttcatggagctgagcgcacatgctggctagtatgagcaatgccacagtgaatatgggtggattggaatatgcttacttcatttcctttgggccagtggaatcatcaagtaattcaagtcatctcagcctgattccactagggactcagcagaggtggacatagctgctctcacttgcccagaacagtctggtctggtgctatgctgagtcctgctttggggagtgtcttatcatcaaggcaatgaccctcatggggtttgattttgttttgtagcattctgctactgcctgcaggcagttttggtcatttgtcataaagatctttgtcaatcatttctgtcatccctggaaaccaagacaattgcagaagtaactcaggaggaaactaaaggttaaagagacaaaaatagagccagagactgtattcaagggtttcagtaccagatgcttcagagggagcccagtataggaacggccaatatgactgctgcatggtatggttaagggaaagttttttattattattattataggagaaagagagagagagggagagagagagagagagagagagggagagagagagagagagagagagagagagagagagagagagagagagagaacatatagctaaaggcatctggaggcatctagagcagagagataaagacatagactgaacatgaccagagctatcagctagagagaggaaagtatccagagatggagaatagcaagaacatagtgagaatagcaggagcagagagtagagagagtaagataataagagaataagtaggggtaaaagatgattgagagatagacaaatgatagataaaatatagataatagaaagatggtagatgaaagatagatagatagatagatagatagatagatagatagaaacttctagagctgactgctgacttgggtgaacaggaactaaacaggaactactgagtccttggggttgacagggaagtacttgggaggatctggcagttttttgtttgcttttttctttagcagtcccctaattttatttcttagaggagttcacaattgcagtatcagatgacatctgtctgtctctgcaaaaactccaaacttggtccttagttatgctggcagaaagcagagctactcaaatcttcaatgtcaagggccatggggcccctgcccagtgtccctctccaccctgtgctcacaagtcctactgggtcccagcaatgactttgggggtggggagctttcctccatggatactcaggcccatcacaaggtggatggcagaggttcccccgaagtcagagctcagcctggtaaccctgctgggagggagttgtgttccccacctagtacccaccttatctcttaccccaaggcagtggctctcttgtagcagtcagtgccttatgcaaaccgtgagacctacccttcccctaggctttggagatttctctgggtaagcagagcagactgacaagttgactttttagagaaaggtcactgctgggatctgggagtgtaaaagcatctgggttcacaatcaaaagccggcagaagtgcaggggcagcttcagcatctcctggtgggggggtggggggctatcagaggggctcttgtcagctacttgtggctctgagcctgggttggagaaaataaaaattccttgtggtcctctctatgcacgtatgtgtgtgtgtgtgtgtgtgtgtgtgtgtgtgtgttgttgttgctgttgttgttgttgttgttgatctttggccaaggcaagccggagcaactttctaacttggtcctgccctgatgttgaccttggaaatgcagggtgagctcctcatcagaagcactggcaggcttcttaggaaattgtagattaaagaatgttgtggaccacagtttcaaccccatgtgctctttaaccttggcaatccttctagaaggcaaacaaggctgcacccaggcacctgcagagtggagatgttcttgcgtgtccaattgaagagacttcctctgcagtagttggtcacaggaacagctgtttggcttccagtttgcaaagtgcttccacacccaaggacagagcaagaacaagtagaacaagttgggggttcttggggagcacttgagaactcaggacctcagaaggtgctacacagcttgagggacccagtcaccccaaagctcggcttttcctagacacttaaattgagctctttctgcctggcataattaggcaggtaaggtgacaaaggcccgcaatgacaatgacaccatcccttatggtgtgttcactccctttgcagcactcaaagaggtcttaaaagccctgtgctgaatgatgggacacaaactgctcccccatggactatagcttgcaggcccagcagggagttccaattcaggggccttaatgccttactcttcccctcctctaaggaagtcatctgaataacaaaattaagctagtggtggaaaaggtgaagaaagatccataagggggggggggagacagagagacagagagagacagagaaagacagagacagagagacagagagagagagagagtgagaatcgagcgaagagttaatgaatcttggttggaaagggaagagtttgctgtatcccaggtttactgcacacttgttttgtccttagggcttaaccttgaacttctggttctcaggcctccgtcccacgtggtgtactagcacaccagttttatggagtgttgggcatgaaaccccacaactttgtgtgtgtgaagcaagcattctaagcagtgagccacatcaccaatttttcttcctgctaagttgaaggagtagagtgagctctcagagacaaggtggccgctgcttaagacggcaagctccgagctgggtggtggtggtgtataactttaatcccagcacttgggaggcagaggcaggtggatttctgtgagttcaaggccagcctggtctacagagcaagtgccaagaaaggctccaaagctacacagagaagccctgtctccaaaaacaaacaaacaaaacagaacaaaacaaaaaacaagcaagcaaacaagcaaacaaatgactatgagctctggccagctagctgtgactctaggcatgccactgagctccacttcctggtttcctcttctgggacgtgtgtgacaaagaagatattaatttgtatatgtgaaatgttcagaagagcctccagcacacagcatgccctgtgactcctggcaactgtcactcaccatttgctgtccttcaaccacctgtctcctacagctgcagctcctagataaacatgctcgtgtttgaactttacaacttataggagtgagcagagtggaattactccttttgtaaatggggaattacgagtacggcatttctttgactctcctttaaggtccttgtttatttttgtatttgtttttgtactggagattaaactcaagagtcttgggaatgctacttgtagcctgagctcctcctccctgaaacccctatttttacatctaattttaagatgggggctcactaaatttctcaggttggtcctaaactaacttgcctgtggttcaggcaagtcttgaacctttctgatccttccgcctcagtttcttgagtagctgggatcatgttcaagcctctgccatcaggcctggctgcttttgattctgaactgcatttttctcttgtatttcttccctttactattagaaatttccaacaggcaaaagcgatcctccccaatataaagcaaatatttttgggtatctacagcattatttctggatgagcttctccttatcagtcattcccatctgggttgagcaagaaaagtcccagccaggtgactggtgacatccaactcagccaaatagtaaattagcaccagactttggcttaggattgcttgattaaaaatttcatagtcttagactttggaattgaagttaggatgggctttatcaaattatttgtctatttgtttgtttggctttttgagacagaatcttgctacgtacgtcccccatctcagattgaacctgcaatccccctgcctcagcctcccagttgcttaaatcacagctgtgtatcaccacacatagttgaaggtggtcttaatagatgcacaagttgaatttcagagtgtaatatagttcttacagttgcctataacttcactacctctgacctctttcattttatcttttttttttctaacttgccccaagaataaactttcctacttgagctaggcactggctgcaaggtctttttgtttccctggcatccatgtttagcagcagagttatgctgttttgtatcctgctggcagtggtctaaatgctgggccattgccacaaccccaggaaacagaaacatcagtcatttcatttgctccacagtctaaaacatccaggcctaattttagcacttgtcgagtgaggaaataattaaagagtggtttgtttattgctaggttagaggattacattgcatgaaggcaattcagactttaaaatatttattctatttgcttgactatcaactgattaattttggacccaagtaatagagaatcaaacacacaggacatgctggtatcatcagtttgccagagaagagtaatctttatttctatactgaagttttatggttgtcttcgaagagcaaccattccttagcatgtattcagtgattgttttaaaaaatgaagaagctggaaatagaacctttctgcctacaccacctttgtcacagcaatgagacattaggattctgtggtttgtccttttactatcaagagactactggcaaagtatgggtctcggctttcatatgtgacctgtggcgttagtctcattggagtcactcacttgcatacttaaaataaaaatagatacacttacaaatcttattgctattcagaaaccaagggcagccatttgaaaagcgtcttattggtttgaatcttttattcaattctgtcagcaaatatttgataagtacttttcaaagagacttcaactaagatgtggaccctgctgctaagcacagttcattcattcattcattcattcattcattcattcattcattcattgttttaaatagtctgttaaagaatgtatatatatgactgtttccttaagggatagtttgacttgacatatcaagaaaatgatgagtttttttttttagctatataacaagttacatgaaattttcagttacataataagttatctgaacatcttttagaaatgggagcaattgagggacccatgagtgctgggcaaatattgagttttgttaaaccatcattaaactttgttaaaagcattattaatgttaatgataagtccttattgatcatactcctcctgatgtttatttttccagtaagtgatctaagatgttcaagggtagggacatttggctccataactgacagctgtaagacttgtccctcatgcattgtctgtcttggaaagggcaagtagcccacctgtcatctaaaaggcactcagatcataactggttgctttagacacaccataggtgagctgaggaagttctagggcaaccacagctgcttgcagctaaaatacaactctagctcccaaatatgtggccactgatacaattatttcagacagcttgctctaggcatttgttagcacaagttttggtgaagtctggatggccctgcctgggttagagaaagtagtttaccttgtggcctcacagaagtactgccatgatgcatgcaaaggggatttgttatgattggtgtataaatagttttcattttgaagatcagtaggaaacacccattttctggctatttggttcgctttgtgagcttgccaggagacatccgagcctgctcccctgctgttgcaacatttggcctagtaaagacttctctcaagtggtcttttcttgtttaccctttatctccgtcataattagacagggctgaaccatagacaatatggatttatgtatgcaagaccctgtcttgtctgtcttgtcaagcattttactgaagacacctacaacctctggctcctatgatctttatgctccttctcccataatgacctctgagcctagggtggtgaggtgtggtatagatgtcccatttagagctgggcactctacagtctttcattctctgcatgttgatcaattgtagatctctattttaactgtcatttacaaaaaaaagcttctctgataaggattgagagaggctcttatcaatgactataaaggtaagaactcagtgatcagtttattactatgtctatttggcaaaataatagaattaaattgtcccatagagcctatgatttggacagtcatgggtttttgtcccaactaatggtaccaggcatgaatttcatcttgtagagcaggctttaaatccaacaagaaagtgtttggttacttctgtaacattaatggcaatattgcaccagtggacatatttttccaggccagtttttattttagctttcatagctcatttaggtgagactgttgctgtgttttttctcttggtagcacgcatagcatcttccagcattataaaagctagcaaataggaatggatctttcaggtcaataccagcttggtgtctctgtgttctatgactcaagtatgtggcattttcaacagtcatgttttgcatccacattctggagggtaactaagagcagtggcaatacctgcaatgtttgagaggcaatctatgagaccacactgaccaataacatgaaaaactataacccgtacctagcactgggcttttttttttttttttttttttttttttttttttttttttttttttggtttttcgagacagggtttccctgtgctttggaggctgtcctggaactagctcttgtagaccaggctggtctcaactcacagagatttgcctgcctctgcctcccgagtgctgggattaaaggcatgctccaccaacacccggcttggcactgggcttttaatttggtggcctatgatgtctaggagagagacattgtctgccacttataaggtaactgcatttaacaaccttttatatatgtagatgtatatattgtaggagtcttctatagaagtaggtttgcatatgccattttcaaagttttttagtgttatcgtttcccaaatttcctccttgaggaacctttctgtgttttagggtgttttatcacagtgacaaaaagctgactaagtcaggcagtgtgtgagttgttgctctgctcaccttgttgtggtaagaaagtttatctttaagatctaatgaccacagttttaaatccaagagaagataagaacacagaaaacaatgaaaaactcaaagctgtcttttatgagaacaatacttatactcatatgagattatagataattttctgtgtcctccctcctttcctctccctccctctgccatctattggtctttctttctttctttctttctttcttccttccttccttccttccttccttccttccttccttccttccttccttgtgtttcaagacagggtttctctgtgtaacaaccctggctatcctggaactcactatgtgaaacaggctggcctcaaactcacagagatccacctgcctctgcctcctgagtgctgggacaaagatgtgagccaccatcacctgactttcctctctttcttacaacatggcctagggatatcaagaataagatatcaacacagaaagggtaatggcctagcaatattccttaattgactagaagaaggtaaaatactctttgcaaggatagttctcaatgtaaaatatgtgatatttttataatattccttcagcagggatttttatgaaaataactttgagtcctctgtaaatatgaagaagtgttattcacagacaggcacgtgtggaaagagattgtcttcaccctgctagaaacatgcataatagattctttttagtcagggttataccacaacaccccagctgccccagacttgtgatctataggtgaactctgtatccaaagcatttacaaatatggacatcaaacaatgctttattaatggctgtatcttattcctcaccccagaaatgcaatcatgtaagagattcttttcatggctcagtaagtagtcaaaaataaacataaaccagggatatctgtcctgtttatctctttgtttattggtcatatctgaatcatatctgtctgtctatgtgtctatcatctatctatctgccatctgtctgtctatctttctatctatctatctatctatctatctgccatctgtctattcatccatctatttatttgccatctatctaccacccatccatctatccatccatccatttacctatcatctatctacttatcctctatttatcccatgggaaagccaaaaacagctgtccagatagaggaagcatagttgtgctagtgtgtagaatagagcttaccgtggttaccctgcaagatgtaggtgagtgggcaccttacctgttatcttccaccaaacagaagccagtgtgctgtgaggaaggacgcagtgcaagaggctttggtgagttgtgagatggcaggtctgacttaagaatttttcctgggctttagactaggacacagagtccactgatgcaggtgcttgcctccatgtcctgcacacagagagtgttcaacacgtactttgtgcacaataaaaataaaccaccagaaagacgagccattgagggatgagatgctgatggggtgaggaagcaagggaaggcttttgagcatcacaggaggtctctgtaaagactcttctacattgtcttggggccgaaatcttaccagtgagaattttgctaagtttttgtttttctactgctgaaatttaagtaagatatgaaaagttggaggggtaaaggtctgctgctctgaagtggtggagttaccacagagtctacagaggcaaatagacacatgaaagactttaggcctcatcatgagagccttgaactccatgtgagcattgtagccaaagtagcttccaaaaggtggggctcagtgactctttcacctcaacctggaggagcatcaactcctacaatgcacagctgcggccgcaactgcacagagttcaagggagagaggctccctttagaatccaggcaggcagcacctcatgttgataatgagcgtgaggaaatttacctgattttcaaacatggccaggcctttgacagacctaggatgaaaatattagaaggccttagagccagagctaaaattcaattcactgtcctaatgttgttgactggcttcaggaggccccgagggatactgcctttgtgctacagccatagctttacttcctaatcatgtttggatcactcagtctttgagatgattttcacactgcctaaatacccaaagggaaagcaaggaggtccggaagacattaaacagccattagaagtcagcacaaagcatagagcaggcattgtacatagtgtaaaattccaaagcatttctaaatttatctcactgtgtttgtgtggcagtgttttaatcagatatgggagccaagcagtggttggggacacttttcctaacacagtttctcattaacctcccgaaatccagtaacgaatatgtattctgagcaaactgaatccgtttggtggacagaggcccttcctttttccttcaccatgatcaacattctattccattgttgctgcagctgcattcaactgggtctttttttttgtgatcaaatgctttatcatcctgtcaccagcaaaggtagaccagcaggcccatgaaaggtgttcaagctcattagtcattaaggaaatgcaaactaaaatgacagtgtgagatcagcattctgttttaaggatggctacatgatccacaaaggaaaggcagatagtgaacataaaagcatcaggctgcaatggaagattattgaagagatgcacacttagggcataagcacagcccatccttagcatttgggatgttacttaacttggaatgtctttgagacccttctatattgcaaagtgcatcagagctctcctcttttaattgctgggtagcattctggtatattgtatttatttaccatattgggttcccacattcaacagttggtgggtatttggtttgttgtcagtgtcaactgttatggactagctcttcatccttctagatacatcttttgttgtgtgactttctgcctgttctgatcaagagcagaagactttgtccacattgtgactccgagcttggctaggcaccttgctgaaatggttttgatgcaaacagaactgaaggatgctggtgactctgctgatgactgtgttctctgtacctgctgtaagacaatgtttaagctcacttgaagttggaggggccagaaggagccgaacatagtcacccgtctcagaaagagtgctaaggtatctggaatgcaggaaggaagggggagggaaagagaaggaagaaaggaaggaagagaggaagagatcgtgtgtctgagagctaagtactctagtagtcttttggaaacatctggactctttaattcgagcaggcatttctatacatagattgtaaaccacacattctaaaacagactttattgatgtcaataagtgaaaagcatcagaaacatatttctcatcccaaaaatggaaacatcatcaccgggttagtaggtaaaatagttcaacataacttctaagataatttgtacaatcagttctttgttatattaaactaaaaaagccacaattttctctccctctctatttccagggttattcacattgtgatgcttggatgcttgctatgtgtgctatgaagatgtggcatctattctaccgtacaattgacatatccctgtgacttgatgtgtctgaaataatgacatgggagcactcaaagacatagctgactttcttttgttctcttgaaatcctgcttaactaccctgttcccaaactcagctgtcagctagatgtaaacacatgagcaaagccaggccaaaccaaatgaaacacctggctgagccctgcctatgtcgccaacccatggagactcactagccaattgagcttgatgtcatttgaattatttctaattttctttataatgaacagtgccttaaaaacatttgcatctatctttatacagcagttagattgtcttgctttacctgcttagaagtgagattactagacatgtttatgttaattaataacaatacaactaaaaggaaggattaatgcgtgttttaatcaattatgaataacagcatctaccatagttatggggtagaaacgagaccataataaagtgaacagaaatgtaatcagtagaatgactacctaattgaatgacgagccccgtgacagtgtgagcaagagtggtctactcaacagtcagcaaatgacttcaggctaaggctgaaaagcaccatgctcgttagtgtagctgtaaccattcgaaggtgacatttaagttagactgcattagacagggactagttcacatagcaccttgtaggctgcaataggcaccttgtactttactacggatgggatgggggccattgggaggcaaagcagagagtggcatgacggtcaggagcgtcagaggtggtcacagcaacagcagcacctgcctcttggttagaacatttaaccatgtgctgttcggatcacccaccgtgtgtctgctcactcactcatgtcactaggagttagttgctattcctctccctgagattctacaagcaaaataattcaagcacaagattagatgacttgctcaccttcacacagacttaataacagaaccagaaatccaaaccacgtaggcgggctctagatctgggctgtgtgatgtaatgaacctaaggccttacacataccagaaaaatgctacaccataaaactgtattcccaaactttgggttctaaaacggtcttattttaccatttaatctttttgagaattttatgcatgagtattctctttgcatcatttcaccccttcctctccccatttcaactcttgctgcatccaccatcccctttcagatttgtgccatcttaattattagtgttacacatagatacatatgtatatatgtattgttgtggaatatttatttaagatgtgttacagtcatttatactgtggaatatttgcttaatgatgcaaagatgccttacatttgtttgattaaataaaattaacctgggatcaggaggttgagtaagcaagtagctgacaggaagtaggaggaggagccaggtgtagccaggttcttaagtgggggctgagcagaaggatgcccagctttttggggagatgagagctaggagagaaggttaattacttgctattcagcctctctgagctaatagaactttacctcgacctttggatcctgagttctataaagggacagagatgtagataaagttccctttagtggtcatgataggtccagtgcctgagggaacagaattcctgcctggctatggccagtgcagcctaatggctgctggtagctgcagagctgcaattgcccattagggcagcagttggcttgaggggcagctactgaatttaatgaaaaacaatgcgctatatacaacctactacgtccactaatgttgctcttatgtacaactattaggtgtgctcattttggattggtgacatactatggggactaatttaccttctctcaccagccatcagttgtctatatctaattcatctagggtttgggtcatgtgagcttcctcccacccacactggcatgtaaactgatactgtcattatgaaagtctaatttagatgaccataatgtcagatttcatgggtacaggctttatgtcatctatggaaaacactatctcatatcagatgtcctggtcctttggctctgacaatcttccttcctcctctttggtgctatttcctgagcttaactgtgggggttgtgttataaatgtattgattggagttgcacacccccaatgtcacttattatctgcattttgacgagttgtgggtttctgtaatggtatctgttacaaaaagaagctacagtgatgagggttgagagccacgcttgtatgtgggtataaggatagtgaggctctctaccaaggaccttcaaagtctgtcatattgttttggggaaggcctagaccctccttgctgtatctgggctgcaatagtatccctccttagggaatgggctcccaaagtccatttgtgctctagggataaagactggctccactgttagaggtcccataggctgtcttggcctcctagctggcacccacattcagagggtttggtttggtccaatgctgttcccccagctttatgactagggtctccatgctctcactaggtcaggtcaactgtttctgcaggtctctccatccccctcttggctcctttgctcaaccctcctccctccccacaactgaatttcagtagtatggttcagtgcttagctgtgggtgtctgtttctgcttcgaacagcaactggatgaagattctccttcctctccctgcccccaggactccaatttggtcaggggttcttgtccccatccccttcttcgagggactatgcaatcttctcttggggtcctccttgtttcctagctcctctggcagtgtggattgtaggctagtgatcattttctctatgtctaaaaatcaaaattgagtgagtacataccatgtttatctttttgtgattgggttacctcactgagaacgggttcttctagttccatccatttgcctgcgaatttcaagataccattgttttttcccctgctgagtagtactccattgtgtaaatataccacattttctctatccattcttcagttgaggggcatctaggttgtttccaggttctggctattacaaataatgctgcaatgaacatagttgaacagatgtccttattgtatgagtgtgcattctttgggtatatgcccaaaagagggattgctggatcttgagatagactgtttcccattttcctgagaaaccgccatactgatttccaaagtggctgtacaggtttgcactcccacaagcaatggaggagtgttcctctttctccacaccctctccagcgtagattgtcattggtgttattgatcttagccattctgacaggagtaagatgttaactcagagtagttttgggttgcatttccctgatggctaaggatgttgagcactttctcaagtgtctttcagccattttggattcctctgttgagaattctgtttagttctgcaccgcatcttttacttgtgttgtttggtgttttggtggctagcttttttagttcattgtataatttggtgatcagccctctgtccgatgtggggttggtgaatatcttttccccattctgtgggctggcgttttgtcttgctgactgtgtcctttgctttacagaagcttctcagtttcaggaggtcccatttattaactgtaaatctcagtgtttgagctactcatgttatgttcaggaagcagtctcctgtaccgatttgttcaagggtgccacctactttctcttctaggaggttcaatgtggctgaatttatgttgaggtctttgatccatttggatttaagtttagtgcatggtgataaatgtggatcaatctgcaatcttctacatgtctgagtccagttatgccagcaccatttgttgaagatgctttcttttttccattgtataaattttatttctttgtcaaaaatcaggtgtccatagatgtgtgggttaatatcagggttttcaatttgattccattggtcaacctgtctatttttgtgccaataccaagctgttttcaggactatggctctataatagagcttgaagtcagggatggtgatgcctccacaagtttctctattgtacagggttgttttggctatcctgggttttttgcttttccatatgaaggtgagtactgttctttcaaggtctgtgaagaattgtgttgggattttgatggggattgcattgaatctgtagattgcttttggcaagattgccatttttactatgttgatcctacctatccaagagcatgggatatctttccattttctggtatattctttgatttctttctttaaagactcaaagttcttactatacaggtctttctcatttttggctagtgttaacccaagatattttattttgttagttgctattgtaaagggtgatgtttctctgatttctttctcagataatttatcttctgtatatagtagggctactgattttcttatgagttaatcttatgtcctgccactttgctgaaggtgtttatcagttgtagtagttccctggtagagtttttcgggtcacttatgtaaactatagtatcatctgcaaatagtgaaagtttgacctcttcctttccaatttgtatccccttgatctccttttgttgtcttattgctctagctagaacttcaagtacaatatggaagagatacggagagagtggacagccttgtcttgttcctgattttagaggaattacattgagtttctatccatttagtttgatgttggctgttggtttgctgtatcttgcttttatcatgtttaggtatgttcctgttattcctgatctctccaagatctttatcatgaagggatgttggattttgtcaaatgctttttcagcatctagtgagatgatcatgtggtttttctttttcagtttgtttatatggtggattacattgatgtattttcgtatgttgaaccatccctgcattcctgggataaagccaacttgatcatggtgaatgatttctctgatgtgtttttggactagatttgccagtattttgttgaatatgtttgcgttgatgttcatgaagatattggtctgtaattctcttttttcgttttgtctttgtgtgacttgggtaccaaggtaattgtagcctcataaaaagagcttggaaatgtcccttctgctgctattatgtggaacaatttcaggagtactgatattagttctcctttgaatttctggtagaattctgcagtgaatccgtctgggcctgggctttttttggctggtagatttttgatgactgcttctatttcattagtggttataggtctgtttaacttgtttatctgttcttgatttaattttggtaagggatatctatccagaaaattgtccatttcctttagatttttgaattttgtggagtagaggttttcaaagtatgacctgatgattctctggatttcttcagtgtccgttgttacatccaccttttcatttctgattttgttaattagcatgctctctctctgccttttggttggtttggataaaggttttgtctatctttttgactttctataagaaccaactctttgtttcattggtctttgtagtgttttcctagtttctactttattgatttcagccctcagtttgattatttcctggtgtctactactccagggagtatttgcttccttttgttctagagctttcagttgcactgctaattctccagtgtgacttctccagtttcttcatgtgggcatttagtgctatgaacattcctcttaacactgctttcaaagtgtcccataggtttgggtatgttgtgtcttcattctcatttaattctaggaagtctttaatttctttttttatttcttccttgacccaggaatggttcaatttcgaattatttaatttccatgagtttgtagggtttctgcaatttgtcttgttgttgaattctaactttaaatcatggtggtctgataagatacaggggttattccaatttttttttttttttgtatctgtgtaggtttgctacgttgctgagtatgtggtcaattttagagaaggttccatgtggcactgagaagagggtatgttcttttgtgttggttggaatgttctatagatatcttttaaacccaattgggtactaacatctgttagttcttttgttcctttattaagattccatttggtggccctaactagtggtgagaacagagtgttgaagtctcctactataagtgtgtgtggttttatgtgtggtttgagctttagtaatgtttctttttacaaatgtgggtgcctttgtatttggggcatagatgttcaggattgagacttcatcttgatggacttttcctgtgatgagtatgaaatgcccttcttcatctcttttgattgattttagtttgaagtctaatttgttagatattaggattgctacaccagcttgtttcttgcttccatttgattggaaaaatcttttcccaaccctttattctgaggtaccgtctgtctttgaagttaaaatgtgtgttttttttttttttttgtatgcaacagaaggatggattctgtctttgtatccattctgctagcctctatctttttataggcaagttaagactattgacattgagggatattaatgactgttgattgttgattcttgtttgttttggatttcttgttggtggtgttattgtgtgtggatttccccacttttttggtgtttggtaaagtgggattatctattgcctatggttttttttagcatagttatcttcattacattggagttttccttccattaatttctatagggctggatttgtggatatgtactgcttaaatctggttttgtcatggaatatcttgttttctccatgtatagtgattgaaagcttttctggatgcagtagtctgggctgacatccatgttcccttagagtttgattttctggctttcaaagtttccattgagaagtcgggtgtaattcggataggtctgcttttgtatgttacttggcctttttcttttgctgctcttcatattttttctttattctgtaagtttggtgttttgattattatgtggcgtggggacttctttttgtggtccaatctatttggtgatctgtaagcttcttgtactttcataggcatatcgttctttaggcttgggaagttttcttcaatgattttgctgaataagttttctgtacctttaagctgaatttcttcgccttcttctatacctattattcttaggtttggtcttttcacggtgtcccatatttcctgattattttctgttagggatttgttgggcttgagattttctttgattgatgactgtatatcctctagtgagtcttcgacacatgagattctctcttccatctcttgtattctattggttatggttacatcagtggttcctgattgtttacccagcttttctatttccagcatcccctcattctgtgttttattgtttctaattgtgctttcaaaccatgaactgtttgaattgtttccttcacttgtttggttgttttttcttggctttctttagattctttaagggatttgtttatttcgtgaatttttttggtttgtcttttcctccatttcatgtaattttttgcttgttttttcttctatttcttttagggattttattgtttcctctttaatggtctctatcatcttcataagataaattttaaggtccttttcttcttcatcctctgcattgggcttttcagttttgctggtgtggagtccctagactgtggcggtgtcatgttggtctttctgttgtgagtgtgttcttagtcagtcatctacccatccctccttccagtgggtgctgttggggtttctccctctctcaagtggccggcagagggctctagctcaggcggcagctgaaggacagagggcagacatattgtggacagaggtgaggtgagcctagactcagggtgggccttccagtctgggcaggtccactcttgtctgggggtgttcaggcagaagtgagcaggggttgatgggggaggttgggggttggagcagcgcccagactcacctgaggctcaggtgccagccggaggactgcaagcctctttataaagtgattgcctcacgtgttttgttatagcgacgtgaactgccatcagggaaataacaaccctagcctcatttacattgactttcagaattttccttgatatttctgctcatttattctttcctgttagttttaaactcactttcagttttaaaagattttattgagttttgaggctcagtataggaaacaacttttgtagattaacaagaaacaatatcttgaaattaaacaatgctcaattgcatcactcctgggttaaggaagaaataaagaaagaaattaaagacttcctagaattcaatgagaattcggacacaacatacccaaactgatggggcactttgaaagcagtgccaagaacaaagttcatagcactaagtgcctacatgaagaaactggagaattgtcacactagagaattaaccacacacctgaaagctctagaacaaaaagaagcaaactcacacaggaggagtagaagccaggaaataatcaaattgaggactgaaatcaataaagtagaaacaaagaaaacaatacaaagagtcaatgtaacaaagagttggttcttcaagaaaatcaacaagatagacaaacccttatccaaactaaccaaaaggcagagagaatatgcaaattcacaacatcagaaatgaaaagggggatataacaacagacactgaagaaatccagagaatcatcaggccaaaaaaacctgtactccacaaaattgaaaaatttaaaggaaatgaacaagaagcaatatatatatatatatacatatatatatatatatatatatgtatatatatatatgtagatataggtttttgggtttttttttttttgagacaaagtttctctgtagctttggagctcatagagatcttcctgcctctgcctccagagggctgggattaaaggcgtgtgcaaccaccaccatcacccggagggaaacaatagttttaaagatgatattgaaagatgttcctggttagtaagcattattgctattatgttccatttgaggggatttctttgcaccttgtctcatagcccccatgcccctcaaactcaaacaacacttgacagtaggtaaagttatgttctgtctcttaaactcccttctttatccactctgcttcatctgctccccagagcagggaggttttttaccaattagctccaaatattcctgctcagaagcgatgcgtgtgaacaccccagcctggcagtccacatctgcaatcttccagcgtactgggcatctctcccatgagcaagctactgggcattttctctttcagtaagaaacccagtcttgtgtatttgctttggtttacagcaccactccacatctgtggctttgttgctttaacttctagttccagtttcatttagtacttcatccaatacggaaaagaaaccatgaaacaaatctaggcaccttctgagccatcttaagtaggcgctgccaggttttaacgtggtcttttcctttttagcccttctgaatcaagtatgtttctgaggccaaattctttggggaaacattatgcctatttaaggcctccaaacttcatgcttcggtacaaaaggcctaagggcgaggattttaaatggatggagtggagaagttttcacttccttaagcaaacatatagcatttccttccatgtgtcagaaatgaaaacaaaaaatacaaactaatttgtcatgaaattttccccttttataattccctctatggtactttttcaacctaacaagtcatattttctcttctttcctgtcaggtttatagctttactggtcacactttcaataaccgtgatggacggtcttcggctgcatagatcatgttcaagtattcagcttaaaagtatctttgtgttcacagcttgctttctgtcacctctcagagccccgctccccaccacagatgcacacagcgttatgttatatgcgcacagagctttggggaaagctcatatttagggcaccaagttagcggaagagaacggctgctccttgggttgggcctgacctcaagctgaaatgaggcaaattgtcatatttatgactccaagtaagcagtaatatatgggcgctcgcatgtgggagcatgctctccccccaacatgtggcctccacttcggttttctctcaagtagtgttttcgcctaagtatgtctctttcgccgcttctgccttcctgtttctgctccacctccttctcccccgccctttggtcttccgttcatattttcttctccctttctcctttctaagctctgactgaactgtgagatctataagatttatgcagagcataaaggatcaattagcccagtaacttcagataactagaattccttttctctctccctccccacccaatcgtgtgtaaccacgctgaagcaccaaacgggcgcatgcgtctgcacatacaagcgtgcaaacgtacgctcagtatcacacacaatcacacacatgcacacttccacacagtctcacacacagtcacacacatgtgcagccttacacacctgagcacatgtacacaatcacacatggttgcacacccatgcacacaatcatataattacacacacacacaaacacagactcggtgtcacacatgatcacacacatgtgcacaatcacacacacgtacacagtctcacacactcacgtacatatagtctcacacaatgagaatgcaattacacatattgagcacccacaatagcacacacatgtgcagtctcacacacatgcacagtcacgcatgcaggtctcatgactatgcacaggcatgcaccacacacagtcacaccctgaacatcacacatggccattagtgctgtccacactatggtctggaaatctcatctgctgggtgctttgggttctgaatcagaaccatttgttttctttgctctgctgcctctctgtaaattttagcagaagcgaaggtcccatgagctctggttcagtgggggatattgagaagggggaaattcagagtagaccactgataatcaagaaatctagagaaccctctgtgtacttctggattgtttcagtttggtcagctctgcggccatgccacaaggcctctcttcctccctcaaagtctaggtttgaagtaacaattcaccttgcaagtgggatttagaccaggaaacccctaggggtctctgcctcctgccctttcctgcagtatgttctggaaggtgtttctctctgtgtttctagcccctgcagacgtgtggagctgctggcagctgtctcactccacagctcccactccttatatctgggtcacaggggtttggagtccacatgtggtgctgctgtgtggttctcgctccttgttatcctggcaaaagatgggcaacactctctctctgtctctgtctctgactctctctctgtctgtctctctctctgtctctgtctgtctgtctgtctgtctgtctgtctctgtctctgtctctgtctctgtctctgtctctgtctctgtctctgtctctctctgtctctgtctctctctgtctctgtctctctctgtctctgtctctctctgtctctctctgtctctgtctctgtgtctctgtctctctctgtgtgtctgtctctctctctctctctctctctctctctctctctctctctctctctctcttccctgtctctcactcccactctttctctctttgctggggaagaaagtccccatgaacacagggacggtccttgctagcttctgtcatctagattttcctcattgtactctgagcattttaggattagagtctcaatcctgactctgaacatgtgggcactgaagctgagtatggtgtacaggtcaagatgacgcagggtggcttcctttttttgctcgttgtgtcactaaggaggcatgtgagatgagtgtcccaactttgcccctttgatttagcaggagggtgatcttagagtgaaagactgggcaccaggggactccgctaagaggaagccatctgtgcggtccctttctggccccttggagatgccagtcagctttccccgagctgttgtttccctctctgggatctgaaggtgttgattgtctccacagccactctcctgctgtgataacatttgatgcactccactttttcaaaagataaaaataaccctcttggttttatttaaagggagaactgtgtatgattttcttatttccacatgtttcctgatgaaggacaagacagaaccattttccctccatctatgtggcgagagcaacagtcacaagcaatccacttcccacaaatgctgacaagatgagggacttggggaccaagtctgtctccacagaacataaaacaaagcaagatttggcagctctccagcccatttgatctgagttgaacggggaataatttttttttacattttatttttggcttgacgtttgttccagtttttaggaaggttgatattggcgcaatgactgatggttttgaagacatcttattggattctgtcctgcagcttaagaagcagggaattattctgaggtttctgttgtctctagactctggtggggggaatgctgtaaagagatagaaatacctgctcacaagcttacattcattagtgtctaacactctgctcaaaacaaatgcatggtagaaatagggattgggctgagttctgaaacttgatttatgtctttgttttcatacttaaaaactcacacacctggctgtagactggcaatttatactcaaactgaaccagtctgaagggtcctggaaggcaggaaagctagttagttgattctctgtgctgcaggcgcctgagcatagaccagctcaagaaacccattttcaggacgtgaagaaagctgctcagtccattttgccatccttcaaagagatgtgaaaaaaaaaacaaacccataacttagaaatgtgttttaattacttgtacttacagtttagtgctgctgagcatgttgtgtaatggcacaccatcaccaccaccaccatctgtttctagaaccttttaaacttcctaagccaaccctacccatgaagcaaaacctcccatttctgcgtctgccctttagccaccagtgatcaccatcatagtatctatctctatgatcttgaccactcgtcttagtgtgggattctattactgtgataaaacaccatgactcaaagcagcttgggaagggaagggcttatttcagattacatttccacatcacagtccatcaatgaacggaatcagagcagcaactcaagcagggcaggaacctggaggcaggagctgatgcagaggccatggagagatgctgatcaatatttactcctcttggcttgctcagtctgctttcttacagcatccaggaccatctgccctgggaagtattacaacccacatcaaacactaattatgaaaatgcactaaaggttttcccacaggccaatctggtggaggcgttttctcaataaaagttccctcttccaaaactactctaggatgtatcaaattgatataaaaccagtcagcccatcattctaggtacttcttttaaagacttatttatttgcttgtgatttatatgcatgtgtgtgagcctgcttgtttatgtgtgcactccgtgtattcggaagctgtaggagaccagatgaggatgccagatttcctggaactggctgtgagctgccctgtgtgtgctgggaagggaatcttccacaatagcagcaagcgttctaaacctccgaaccacgtctttgccacacttaaattcttcttctaagaaccctccaatatttgggcctgtaagtacttggcatgtaagcctgaatgaagactggaattctggtcctggaaccccagcaaatgctgggtgggctccacatcctataattccaacctcagaagggtgagagaggggatgtccagagcaagctgactagggaagactagccatattgaaactcaagtttggttgagagacccccgtttcactgaataatgtagaggagcagtcaagattgattaccaacaccaactctaggtctccacatgaatgcgcactctcccacacatttgtgcccacacacatgcaaacatgtgtatccacacatgagaaagtcttctggcatttatcttcatgttactggcttatttccgctagtccgtgtactttgaacaaagtacataactaaatttcctctcttttatgactgagtgatgctgcacagtgctcatgccaagttttatttccacatggatggctgagtgatggaccactcccacctctggccattaagatcagtgctgctttgaatggagcacagcacagatattaattccttaaaaaaagtgatgtattttccacaaagcatccaaactttagcaatcccccctagttggcaagcatgactggaatctgaggcagtttcttcattgctttgatttatgctgggagctcattgtgcccagtgaattgctgttattttctttctttttttcaagacagagtttctctgtgtagtcctggctttcctggaactcacgatgtagatcaggctggctttgaactcagcaatctgcctgcctctgccttccgagtgctggaattacaggtgtgcatgaccatgcttggctggagctcgtaactgcattctactctcctcacagaattttattttgtcaatagtttcatggagaaaatcatttacagaggaagttgccattcttcttggaacaatagattaagtttgggtgctaggtagatggctcaggagtcaaatgaatgtgccactcttacagaggacccaagttcaggtcccagtacccacaactccctgtgaccccagcggtaggggtcaactcacatgcaaaccctccccttccctcctctttatatatacatcaagggtaaaaccttaaacatttaacttgttttcctttgaccttaaaattgggagcagttgttgaaaaacatttatgctccgtagaattatcaccattcaattatcatagtcctcagtgcagagtcagtcaaaatgacataattttatgattataatgttgctatgtcatatactcatataaaattttatgagaagatgttttaataagacagagctttataaagttcaatctgtcctcttccagctgcaatgacacaaagctcagaatcatttgcacttctagtttcctttttttttttttttcaatctttcttatttaaatgtagcacagagtcatcttttgcacacagtaagttgtttgggaaaggacagggccaggttttcttttgtcaaggaagtgcaccttcagtggttaatgaagtctcacaactggtcaaagtgcagagaaaaagtacctgcagagtccgaagccacaggcaggacatctctatcgcactctgatctccaaggctcagggaccacaaggaagaggggacagaaagaccaaaggagccagaggttgaggaggaccagaataaaatagcgtcttctggacagaacagcactcactgctgcaaccacaaactcatgaaacatcctcacaaagtcaagccagtcaaagtcctagcacggaacagggaggagtttattatcccgacccctagctgaggagaaactgacagttgatggctgctggggagggagcgagggttggtttcctttaagggtgtggcccctggtaggttaaccgtgttccactggatggtccatacccaggagtatatgctcagctccttggattatttaactgaaagagggcaagaagttggcaggggtggggaggtaggggcaaatctgggaggacttggggaaaggaatgggggatgatatgatcaaaatatgttgcatgagattcctaaggaattaataaaaggtgtttttcaaaggaaagcagaactttttattttaatttaagtaaacatacattcacatcctttaactcatcttatcttgcaaattctagagaacaaaacccttccaagagtttggacctgggcacaaaaggctcattgcccccccctccctccccatgttcttttgttcagcactctcttagttttgctcttcccaaattcttctgcaggggcaggttctctccctttgtagtccaggctggtctctaactcaccaccttcctgccttagcgtactgagtaccagaactgcagatacgtgactcctcacttaactttgcgcattttcaaagtggcaggaggatgtaagtggcgaggccattacataaacattgtcacctacttactatttcaccctaagatatatctaactggagaacaacccatctgtacggcactgtagctcaggtgtcaggctttcttttcaacagtgagtaccacacagggaggcgcagaaaaaccctgcatagattcgccatgccctgaggggcacaggcacattccctttggcacctgtgtctgtgaacaagcaggatgcacctcatcacagagcaccacagtgacactcaggaggacaagtgtctctgccttgtgtggactcagaagggaagaccaacaggaagcctcaaccacatggacctcctaagcagacccattttcagaaccaaagatcagaaaacatattcttaaaaaccacccatgctgtatacccacctctcaatgcacctgacactatgggacaatatgactcttcagagaccactgtcttaaacctctgcacgccctcacgtgctatcatatatgatgacatcactgatggaaatcccttgctttcatgttgaaatttcttaagaactcatgagctccacaggttataaactgcacagctcttcgtgggagaaaccttatccactccttttttaaatgtgttatttcaaaaaatgcttgttaaacacctaccacttggaaggcattttgactaagctaaagataatgaccacataaaataaggagcttgtgtattggttacttttggttgctgtgataacatgccatggccaagagcaactccagaggaaagagtttattttggcttatggttccagaggaataagagttcatcgtggcggcgagcaccacaacaagcagcaggcatggcggcaggaccaagaagctgagagctcacagcctcaaccacaaatgcaaacagagcaaactggaagctggggaggctatgaaccttccaagttcatccccagtgatgttctttctccagcaaggacaaagctctcaaaggttccacatctcctaaacagtgccaccaactggggaccaagtgttcaaggaagtgagcctatgctggacatttctcattcaaaccccaaaagcttgttttagacctgggaagacctttacacaaataacaccacagtagaggcaatattataaatgctaagtccaaaccaatccgtcatgctccaaagaacatgctccctgttctagaaacaacaagaaagacatgtggggccattgctgtttgaaagggagcacttcatttaacttttaacgtttgtacctccatttatgagcaattggttagaatccctttaaaatgagttagcctatttcctacctgtggtaatttggagtaggtggaatcatggtttatattaattttttttctgtccagagtgtgcatatagcatcagagtctgtcagttatgtattcattgggggaatattttcgtatcaatctttctcacagacttgagaacacatttacttttatttcatgaacttcacttcaaccaaagaaaatggtagcagtggtggtagggtttgccttgctgactcagcgcacagagctacatttcatacctgtcaggcagcatagagatttttataaggtgaacaatggttgtatttaggtactgatggagtaatcttgaaggcttctggcagtaccctttggaaactgaatccataacttttattagtattaaatgttgctaatgggaactgacaaatagttgaatgggatagctttttctctgaacttggcaaagagcaaaggaagaaaaagtccccattacacaatgagatatgtgttattgctcaagttcattcagatcaattttgcacaaatataatttaagatcttttacaactgttggtgagattactttgtgctgtggggaagttaaaaaaatttagggacctaataaaactgttgttgtcatgccattatgaggtgctgggacagcatagatgtttgtgacacccatgcccctgtgccaaacaaaggaaagggggaagctgattggagagaaatactgaacagggctaaaacccaagtttgcttgatagtgacaatttctgttgggcttagtatccaatcaagctggctaggcagtgaggcatattaacccatcagctataatagagaaggtgcacacagacaagcagggcctatcatttaaactattgttgacataatcatatattatcttcaggtgtatttcagagaaaatttgcagtagagtgcttccttcttttcatttaattttgcttacaagtatgcccagatggattttctctgctctctcttatagtatgcagccaaaaattaaaaaaatgtctcttaatggtctttagtcagactgaaagcttttgggaaaaaaaaaaaacaaataagaaaaccagccactttgaactctgaggtcaaaataaatggccttgcttggatcaacacttcagtgatgtcagggcaaaagaatacaccatgaagatgtgcaaagattggagtcttgaagatgggaaatagaatttgcagggtaacctcaggggaaagtggttctttccatgtgactgagatccataggcggagtccatggatcccgcattcgaatgctcccagcgcagagagacgcagtcatgtgttgcagccatgcatggcttggtatgtatgctcctgttactgtgttcagctaaggaaagccatacagatgtctacccttccttccccatgctaggactctttgtaattgagtttctaactgcctaccccttccaaagaattacaatgatcagtttttataattcctttgcctttcaaagcatttcgcttaagaatgggcctgggcaccaggacctatctcaggggtatgaattgacttttttttggagcccattcctggtggtgggttaccttgttcagcctgatacaggaaggcagggcttggtcctgcctcagctttgttgactccccaaggaagacctaacccactctgaggagtggatgggaggtgggaagggtgggaggtgagggccaggagaaggggacggagggggaactggggttgttatgtaaaatgaaaagtaaattttttaaataaataaagagtggatgtgggacccactgtatgcctttgtctgtttaaaaaagcaagctaccacctgctgggagtctgccttctagggaagagacatcaggcagatgtctgtttgtcccatgaagtgtgactcccggaagtactgtggtaccctattgtgctgaggtgagatctgagctaggagagacaacaaggataaaaaacagttccttggtgcctaggacttgctttcttcttggtggccagggcctgggctagagtcagagtcatggagctctgaccctcgccaattgcataatttctggacaattctttctccatgaaaaacacctagttcatagagttgccgtgaactttaaaagaataaatgtatataaaatgctcacgagacctctggccatgagcgactgacctgaacaaccggcttcttcttacatgaatcattttgagtctgtttcattttaaatgaaaacattcaacaacattaaatagcataatactattgtctttgctttaaggcctttcttaaaagatagcttccttaaaaccagtgttgcttatatcatcacctaattttctttttactaaagggcttgatactatatgttttatttattacttacggtctcctactgcaagaagtggaacaaaattttagcgtcagaaattatcaatttattattattattactattatttatgtgtgcacatgtatgtcatgatggctgggcatttgtgtggatgtcagaagccagcttccaggattgtttcttgcctcccagctgctgaggtgaagtttctcttctggccactgctatactctgtggactaggagttcccttgcccctcccatctctctacaaagtgctggggttacaaatgcataccaccacactgggctttgtatgtaggtcctggagtttaaatgcagctagtcaagcttgtccagcaaatactgttacctgctgagctgtctccctggcccaggcttagctttgccaaaaaaaaaaaaaaaaaaaaaaaaaaaaaaaaaaaaaaaaaaaaaaaaaaaaaaaaaggactaggtcttccagtgtctagatgaatgtctgtcgtagagtattccctcagctaacatttgctgacccagtaatgatgcgtcattctttcctgtgcaacaagtggggctggccaaccgttgtcctttgactcataaacatgacagacaggtagcaaaggcagagttactctagggaaagaaaagtgaagcaattcaggtttccccagaatggattggtcaaggcagcctgtgagccatgcttcgctagaaaacaatgagtgtattgtgtctgataactggggctggcggacctgaactctacaggacagggagaggctggaggctgcaagggaaatgctggagtcttgaggcaggaattcatctctcagattgaatttagttattaaggctttaaacggattatatgaggccctttcacattactggggataatctgctttaatagtagatactcttaagtgtaattagaccctctcccagacacatagacactcacagacacagacacacacacagacacagacacacagacacacagacacacacagacacacagacacacacacacacacacacacagacacacacacacacacacacacacacacacacacacacacacacacagtaacacctgggttagaagcagatgaactcactccaaagtgttcttcagccaagtgcacatgccaggctaatgtcacaaagatggtaagaatagaatacacatatcccatagctgatttaaagggcttaagaaacacatacggttggtgtggcggttccatatatagtatacaatgtacaaattcactcaagagccaaactccttccattcatcacaaggcagcaatggtgtctctcacagtagtttccaggcattgtctggtaaatcataacctagaagttcagccccccaaaaaagccatccatcctcccaagggttatctaggactagttagtgggcaaatgcatggataaacatcattttggtcttggggtgcttggcgtgtggtctgcttgtcaatacaaaccctcacaatgataacttgttatcaccaggataagagttcacaacattctaggcaatcccaacaccctacacaataatctctgtcccgcacacccggagcctaggctcattgcacagggtagagtgtctggtttgagcagcccatgagggtgttgagcaaaggcatcgcacagagttgcccagtatgcaggcttctctgggaggtatgttgtcctgcataagggttacctgccccagcctccctttcccagaaaaacggcagaggacaggtcgagagtgcttcgggtcaagctaacagcctgatggcgactcttgtacacagtcttaatgtttgatttgggaaggtacaacctctgcctctatccctcaacatatgggtgacctatttgctggtaaaaatataaagccttatcattaattaataaaaaagggggatatgtagggagccgttcctgcattctccattacaataatggtgcccgaagacaccaaaatgtaaattacttcacaggcgctgggtaatttccattcctttgatctctgcctatcccgtggctcatttggcctgaggagctgaagccattcatagggtaacacgtcccaggcggctgcttgccagcctttattaagggatgggtttcttggttcagggtctccgctctggtaagcttatgctctcccctctcaagatgcattaaagcttgtctgcagaaggatccgagtgtcctgcgtgtatttcttgctggcgagaacatacagcgcgcgggacatacctattctctcatctcgttcggtttctgatatattatcctgtacctctttaagcattttttgactctctgctaccatgggacggcaagcctcaatctctagacagtttttaattaggtctctctgttttgaagagcccattatgctggaggctacctggggtaagcttggtctcgaactggaacaccagccacggtgggcataatataagaccaatgtgaacaaaattagaataaagactagaattaaggcttttccatcccatagtggtgacaaattaaaagcaaagtcaaaaaagaaggtgtcagaataaggcatacctctccgaacttaccaccctgcagttctgaatccgccccgttagaggggtctccgcagtgccagcgatgttaacaaattcccgggtttcggcaccatatgtcccgcgcgctgtatgttctcgccggcaagaaatacacgcaggacactcggatccttctgcagacaagctttaatgcatcttgagaggggagagcataagcttaccagagcggagaccctgaaccaagaaacccatcccttaataaaggctggcaagcagccgcctgggacgtgttaccctatgaatggcttcagctcctcaggccaaatgagccacgggataggcagagatcaaaggaatggaaattacccagcgcctgtgaagtaatttacattttggtgtcttcaggcaccatcattgtaatggagaatgcaggaacggctccctacaaatctcatttagttgtctgtgatttagttgctttcggtgatatattatttatgatttattaaatcttgcctgaggactcagaaagcaaagtcagcctcaagccagaaagcatacacatttaatccctggactcaggattaagaggtacacatatctctgttagttcaaggccacactgactacacgagattgatccagtcctaaagagtaacagcttacacaaaggtgatcccagcacttgggaccacacacctttaatcccaggatgcatgagagatatttaagacaggaacagggtctcagagctggcattcattctccagacacattgaggataggaaggcagtcagtctcaggattagtctctagccacgttgaggagagcatagcagtctgagggaatctgaggagcactgaagtcgagagcagtttgaagattgcccctttggtctaagctgaggtagaggtaagagctagtggccagctgctttgcttttctgatcttcagcttgaagcttgaaccccaatatctgtctttgggtcttttatttattgtgccataattgctcttactaacagtttagctcccagaccacagaaattcttggaaacttgaagtacccctggtacattcatgatttcatgtactgtgcagcttcactgggattgggtgaagcagagttgattattggctggattccttataaactcctgagggctgggcgtcatgacacatacctctaatgccagtactgccagctgtcccagaactcaaggtcagagaccagaggatctctatgagtttgaggccggccagcctgctctatgtagaaaattccaggctagctacatagcaaacccccatctaaaaataagataaaatatatatttttttaaatttggagaaagcttaacttgtaacttgctgtgtagaccaggctggttttgaactcacaaatcccaatgcttcagccttctgattgctgagatcacagtcttgacctcatccctctttcctggtggccagggtcccccccccccagggcctgagagggctcacttaggctttcccaggagtagtaagcgcttcgggacaaaactgccaaaccccaggcagcctggggtggaaatctggatggacagcacgctgtgcccagagtggatgtttcctgtctcagatgttttctttctagggttcatgtccatgctcctttcaacctggaaaagcataatttcaacttaaggaaaagcaaacaattgcttttaataggaatctttatgggcatgattaggagggctttttggacaacaaatgactatgatggaacaacattgcggtgagttaagtgtaaacggctcagaaatgctcagattaaatttccctggaaacactcaagggctcccaaaacgactggggaaaaacactcgggccatgtgtatcttagactttacatttctctctctctctcttgcactctgctgattttattttcctctccaaaacacttctcagggtgatctcatctcttgtggtcagcatgctgtcaggctagattgtcattaatcctggtgcgttctgggtggcctaacctggtatcaggcctgtccctgctctttccgagggcgctttcccttctgatatttgttttcagtgtggagagggtataaacctacaaacagttcaaagtctctgtgaagttctctgcatttggaaatctaccatcaagacatggagatgaatgtgtgaggcagcttgtctaaaacagataaatctctgttctataactcagaaaactcagtctgggttgggctggtgccagggaaagccatcagcaatgagtcttagaaggtactttggaaagcccctacccatcttcaaacctcagacatgtctcaatagaaagcatatcagaagataatagttatagtctggtttctgaagtactgcttctaacacattctcttctacatgctttagaaaaatgttcctgtgtctttccctctgaggagattcccacaaaactaaccaagttctatttgtggaaagttgagtttattttcctttcccccatctttggagaagacagattctggaattcgggttgttatctatgtcttttcctcttctgaccttgtcctagctcagtccatgaaacttgtcaaatgttttgctctttccaaagatggcgtgctgactttgggtctcagagttgctcctgtttaatctccaagcagtacagtcttcctgggcactaagctgtctgaaatccgctcacccacagtgcgttgtgtgataagaaaaagccatccagtttactcaacgagctcaaaaccagtaggcaagctgggagctgttcaaagacttaagagaggatctgcaagccctctgccacagataactgtagtggaagacaaactgatcacacatgcacacacacacacacaccacaccatacatatacacatacacacacataataccaaatcagacatatacacatacacacatacataatatatacacatacacactcatacacacatacacacacacacacacacaccacatcatacatatacacatacacacacataataccaaatcagacatatacacacacaccacatcagacgtatacacatacacataatacacatacatacaaacacacacatgtaaacatgcacttatacagacatacatatacaaatgcatacacacatccacatgcacacacatgtacacacacatacacatgcacacacacatatacacatggacacacacacacacacacacacacacacacaccatgcaatctggaacctagcccaaatcaagcaatcctcaaacttccaagcttgaagagccacctaactttgcttgagaacgatgggagcctgtggcacttttgccctcggctgttctcatgctcttcttcccttcttctaactgagtctctacagactcgggaccaaccaggccatgaaaacaagtagctccaactatgagttgaaggagcactacctgattcggcctggtgggcagtcctcaggctaagcatggcagaagtggtgacctgaagcccacatctctactagcctgaacttgctgtcatggttacagaattctgtgtgtgtaactctgtgaggtgaggtgtgatatatacatacatacatacatacatacatacatacatacatacatacataccccaaataaggagaaaatatataggaaagtgcattgaagctcttatatatttataacttagactatgaaccttattatgcaaatggtgatgtgtgtattgatcatcaaagcagttgttactaaaataaagtataaagaacagagaaatcaaaatgacacacaaaacattttgccattacagaaagcattgaaagagaaaccaaaatattagatacatataaaaacaaaaagcaaaatgacaatgtaaatccaatcacatttagtcagtgtattaagtgtaaacattctaaagatggtcaagaggagaggagggggtgttttcttcagagacgggggccatgagaggctggctgtgtccctgtaaatgctcccatatatacaggcagcactaaatgactcagtgtgtgtgtgtgtgtgtgtgtgtgtgtgtgtgtgtgtgtgtgtgagagagagagagagagagagagagagagagagagagagagacagagagacagagacagagacagagacagagacagagacagagacagaggcagacagactatgagatggctcagtggaggccctgagttctgtcccagggatacagttcatcatgatgcatagacatggtgaaatgtcaccttcatggtgacaagagatttcagtggggattgttcatagcatggccaggcaggaagaacagagtttggaccagaagtggaaccagtctataatcctcacccctcacctctatagttctttgttttcttactaggcccattgtccaatgtccctaaatggatccactagcctgtgggtggtcattcacaattgaaactataataataactaaaacaattggaacaggatcttgggatgataattgtgtacctacactcatagaagcattattcacaatagcaaattagggaaataacaccagtgctgatcaaaagaatgaatagatccagcaaaaatattatatccacaaaatggaatattattctgccttaatatcactatgcttagttagaggccagacacagtggctgtatgtatgcttatatgaagaaacagagagaatggataattaccaggagctgtggagaggaggaaagggactcactgtaaatgagtatagcaaagtgttctggggacacatggtacaatagtgatgattgctcactgtgctggctagttttatgtcaacttgacacaagctgaagtcatctgagaaaaggaaacctcaattttaaaaaaatatatgccttcataagatcaggctgtaggcaagcctataggacattttctttatagattgatggggcaggtcccagcctattgtggatagttccacccctgggctgttggtcctgagttccataagaaagtagtctgagcaaaccatgaggagcaagccagtaagcagcacccctccacggcctctgcatcagctcctgcctccagtttcctggcctgtttgagttcctgtcctgatttccttcagtgatggactacaatgtggaagtgtaagccaaataaactctttcctctccaagttgcttttggtcatggtgtttcagtttcaatgacaactttaactaagatactcgctgtgcaagcatccagttatgaatatgtctatactaacccaatacatttgacatacattagatggctaaaatggcacattttatcacagtacaattttaaaagcaagtaaatcagctaaagaaagtataatggaatttgaggagggggaaattatttaaagaaggtggtaataaaagtgctagtctataaaatgataattcattagagacctagaggaataaggaaaagccatgtggatgtcttgacaaccaacattccaagtcaaggaaccaagtcaaggatatgtttagcctctgttggggtcacaagctcatgtgtttggatacttggtccccagctggttggttctgtttcaaaaagttatgaaatctttaggaggtggatccttgttacaggattcctgcctgggtcccattgctgctttagagcacccaaataacacacagagactctattagttgtaatgctgctggccaatgtcaaggacttcttattggctacctccgtattaaatattaagccataactgctacatatataagtatttctacaaggtcttatcttactctcctcccgggatcacatggtgacttctgactccatttcccagaatcctccttatctcctagtcctgtctatcttgcttccctattggtcaacagtgttttattcatcaaccaataagacagacacatttacaaaatgacatctcccatcatctcctcttttctgtctaaataaaaatattttaactttaacatagtcaaattgtatataacaaaacagttatcaagtaagaactatagttacaatatttagtccattaacatttagcaatatttaaagaaagtattgtatcatctatgctatctttgtgagtctaaagtactatatgtaacttatcctttatcataactaaggaaaactataaccatgactatctgttttcaactccatcaaagaccacagaaggataatatataaactctagaattgacagaaacaactcactgcctggccagtcacctgaagttcttctgtaatgttggaacatccatcttcagcccaaaggccataatgtgtctggaagacttctcagcaaagcagggaatgtgaaactgttccatctgtattggcagtttatcagtcttttttctctgtgttctgtagaatgtctggcagactcttctatgaaacaggaaccttttagcactggccatcttgttttgtaagttcagcagtcactttcctgagggttctgtatgcccagtttatacagcaacagtcaaatagtccaagtaagagtggtttcttgcccaaatggctagtctcaccatattgaaagcaaattccataacgagtttcttcaatgcccatcctcctttctgacataattggtgttgccaggagcagttgtgtctcactgccaggaaaaaccctaaaccattttaaatgccatattctgtaggtctctgaaaggtttgaagactatctatctatctcaaatatatctctgtatatctagaaaacctaacaaacctaactaagttttgactattataggtaactatctataatctgtacttaattatacattacatttttaaaagatctgtataaacacagtatctaaacaagaggagatatcacaaaattgatcttaaatttgtatcaataagccaaaatccatatcaatgtaagtattcgtttctagaaggagattggttgtgatccttaaccatttataaccaataccattaaaatgaaaacaaacatttataaacaatatttgagaatgtgggtgttgttctctccaaactgcttcctgctgttttgggggtgctgtccattccctggggatcatgacaaaacatagaaacctggtcaggtccctatttttgtagtctgtaagactgcatcgtctcagctgttttagatgctggatcacctgggacactgtttcagggggtcttgcttcatcaaactatatcagtctggaaggaatccatagctttacattctctggggaaacacaagcaaaaccttttttcccaactaacatgtcctaagacttaaaatttgaagtcaaagcatttttaaaatgtataaattgggttgatctagagcctttcttttagtagttgttgctatttcctcagcagtcaaacaattcaaacacaacatactagcatacaggatccaggatctctgtgtattatccatctttacatggcttttttattactctatttcttttaattttattttttcctgttttgagacagggtttctctatgtaactttggctgcccttgaactcactctgtacaccaggctggccttgaaatcacagagatctgcttgcctttgcctcctgagtgctgggattaaaggtgtgtgccagcatacccagctactttattttttttccaagcctatgtatatttttctttactgtaaatctttatctttctgtaaccatatgagtctatctcggtttggggtgattatgcaaatcagggagctgctcttaaaaggactcgaggtgtgtctctcaacgcctgggaaacagagctcaccaagaaaatgctgctaccaagaaactatgcttgcctctgttctttttgtttttaaaatccctttttaagtttttgtgaagtttttatgtggaggttcttagaacccacattgctggcaccataatgttacaggattcctgcctgggtcctgtcaccccttctgagcccccaaataacacacagagactctgttagttacaatgcttctggccatgtcaagggcttcttattggctatctctgtcttaagtattaacatatctatatatctatatctatatctatatctatatctatatctatatctatatatctacaaggtcttatcttactgagaatgccagactcctgtattctctcctcccgggatcacatggtgacttctgactccatttcccagaatcctccttatctcctagtcccacctatcttgcttccctattggtcaacagtgtttttattcatcaaccaataagagagacatatttacagaatgacatctcccatcagatccttgttaaaggaagtaggtcattgggggtgggctgtgaggatttatatagcctggtcccacccaacacctgctttgctgtggaatagtccttctgtacactgtgaatatgtattactcccattggttaataaagaactgactggtcagtaaccaggtaggaagtacaggcaggacaaccaaactaagaatgctgggaggaagtagggcagattctggagatgcctgctgatgtagagagaagcaagatactgagaaaaggtacctagccacctggcaaaacacagataagaaatgtgggttaattaaaacgttaagagttagctagtaacgagcctgagctattggctgagcatttatatttaatattgaatctccatgttggttatttgggaactggtgggtaggaaagaaaagtctgcttacactgctttctactcctggttatatatgcagtaaacagctgtctcatagtcttgcaccatgacttccactatggtggattctatctcctgaactgtaaggcaaagataaacccttcccttcttgagtcgcttcttgtcaagtgcttgggcagagcaatgagaatgtagcctcactggggaccagttaggagaccattgaaacagagtgactgagtagaaaccaggacacaagaccagtgagggattgtgaccaggccttggaacatgctgtagaactttagagtttacttttgatgagcttggaattcttgggcaaagaagggaagtgtttatcacgttctcttgactcatactgcctaaaagaggatagaccagagcctgcaaagctgaaagccaacagtgcaattaggaggccctggcaatcactcaggagctgtatccatggttcaaatgcttgtaatagtgtccaacatgaagaagtcctgggatgctgtgaccacaaacaagaggagtgggtgtatgaaagagagaaataaagaatgacatcaatgttttggaagagttggaattgattataaaaacaaatgtatttaagaaagaaacacattagcctaagactgaaaataagatgccatgaaactgaactgtgaaggtcctgctgggatagaatcgaggaacgagaaaacttaaaaaacaaacaaacaaaaacaagaataaaaccagcaaaacacgttgtcctgttctgcctgaatgtgaaacgttccccacaggctcatgtatttgagtttggtcaccagatggtagaagtgtgtgtgtgtgtgtgtgtgtgtgtgtgtgtgtgtatgtgtgtgtgtgtggtgttagtaggtcagacagggtcttttgaagtatacaccaaattctcagtccccttgccagctgctttgcctcctgtttgtctagaggagaaaagtatcttcctctgagtgctcccccatgcatcaccacaggtatagaatcagaatcagctcagcctggatctttgggctcagatgtctgaaactgtgagccaaaataattatttcctcttttaatccccatcacagctatacaaaaataagtagcacaagtgtttaggtctgattcagcataactggtgaccatgcctgtgtttgcttatgctctaaacgcactgtagtaaccaaggaaacagtgagtggaatgcacccggttggtttttaatagcaatctgaaccctgcattcaaatccctgtctctggagatggaggccgccatgtttcccgggtccttgcatggcgtctgttctccaccagatggcagcaccgaagctccgagtgcttctgtgcagtctccaggcttaatgagaataaatgcgaagcttctgggaccttccgggcagacttctagtctcccttcatctccccttccttgctgcaggcacccacccctcccaacagccagctttctggactctaacgaagtttgtgacgatataatctctggccacattatttactgggcacatccaggcccaggaagccatttcctggaggcatctatttttttttttttaattggtgttcattagccccactaatacattctaagggaaacagaactttaataaatttcacagtgcatgaccagtggacttcatgaatattagtcactccaggcactttttgtttattcagcttcccgctcctcctctcctgccctgcctgactccggacttgtccgtctgtggggacgataataaaagcgagagagctgcccggccacagaagactctgcaaacaaggggcaagggagctttctgagctcacacctgttttaagatttgttatccttaaaacgaaaagctgtggggattcaccgggctctttccttgtggctcccagcggaccttgctgtaaaccgcagggaggagcggggcctgaggagcacttaaaagtacttatgtcaaatccatcccgttcttccggcctgccttcctcccgccagccaccgatcccaggggctggagcacattacaaggccctcacttcgtatgaatgggcacaaacagactttttcaccatctcgccgcgtctacatttgcagacacatcctgtaggctgcctgaaacagccttaatttcaatttactgtctccccgaggaccttgccattctgtggaaagtggaaactcagtggtcggttcttctcccccgcctctcagccctggcctcactctgccctcctcctctttcaaggaaaacgtggaaaggagagcattttttgctcaagatgaatagaaatggcgttctgatgcatctaacaggggcctatggtcttttatactgaaaaaataacgagcaggttagaccagattaccacatttggaaggcgttcaaagtcggtgtgcaaagcccagttagggcagcatgggtctcccagagggcaattacacaggagagcatggaatcatagacctgaaattttacattgtcattttctaaattctcctggggctaactatctaactccgtgttataaaaattttcaaatgtatacgaaagcagagtcaactgtaggatcagtcccagctctcctttgacccgccatgttttgtccagtcatcttcccactgtgttcatttccttcacttggagatttagaagcaaatcagaaaataaacaaacaaaagtaacagtaatggtaaagatgtcttctgccctattaacagttgtaccacactggctgcctcacactagagagctcaagaacctggtagtggttcagtccacaaggctggatccttccagtccagtgcagaaaatctaaggggttccaggagactggctggttcttagtcagccatggagcctggaaaccttgggtctgatatcagggaagaaatcaacaccaaatcaaggaagacaggccaaccaagcagaaggcaatagtcgtccattctccacacccttttaatctgggctgctaccagaaggtacagtccacacgtgggacaggtcttctcctgtcagttaaggccgtcaagacagttcctcaattagggctccctgataaggtgattcttaactgtggctagttgacattcaaaacaatcattacccctaggttcccaaagatattccccaagagtcccttgatttttttttttcacccttcaccagaaaaccacaaaacattaacatgagaaatgcacctggtcatcatgcatagactaaacacaacggaggcaaagttgggccaaacaaatgggcctctgagagggcaataatctctgatattcaaaaatctatttggttttaattttgattcatttaaaaagaattcaaaacatgcccccttgaatctagtcactgtactttatgagctactgggagtcacagggggaaatgcttacccttggaaggactctaccttggggtactattgagtgagggctgtgcctttgaaatcagactgaaagaaatgaccaaggtgggttttttttttaaaagcttgaagcctgtatcaaggtccttctatttacttgttttcttcatgaaagcattggaaagcaagatgaaaaagggagacagtggagagaaaatcagactctgagcatattcaaatatttacatttttaaaactaaaacctgttaagtggcctacaggctatgtggtatttcacatatctcacaccattctcaaaataagacaaagtaggctttatcatttatgtgccacataaggctatgagaagacttgtgttcatgggctggagtgatatcttagttggtaaagtgcttgccttgcaaatatgagaacacaaagttcaaacccctagaatccattttaaaaaataatacctaagtggtggaggtggagacaagtgataccagacaacccagcctacttggtcagcccaggccaatgagagaccctgtatcaaaaagcaaggtgggcagagcctggggacgaaatctcaagctatcctctgacctcctcatgtctatgcaaatactgagatgagtgtggacacacacacacacacacacacacacacacacacacacacacacaccccaaaacaaaagcagaaaacaaacctaaagctcatgctcccaaagggtgaattagtaagaggtacccaactaactatgtcatctggggactggggactggggactggggacccagatgctggaaccagactttgcatctttgctgtgtcgctcaggatgctctcagtaagtgatgaatgaataagatggaatgtgtaaacattcagcttctagtaggtgcttatcacatgtaaacatataaggcaattgtgatacatttcaaaatatataatgaataaacatctctatatgtgtaagctacatacatgggtaggtttatggaactttatctttcaaattgcctctaggaacatgacaatattatcaaattcaaaggtattacttgattctttaagccttttagcatgactcaaatgtcctgtttcctacatcagtaaccacagaatgtggccaaagccctgtgtatattgggaaacttaacaaagcttggaaaacaacagggagaccttacagaaggaaccataatcctgagcactcatttgtgtctcatctgaaccaagtaccttttcaaagctgtgaagctttgctggttgtatggtgtttctgaggatgatcctactctgacacatgcatgccatctaggagaaattgtggctagcgttcaccacaggtgctcaaaacccagttctgcctcttacctgccctatggttttagactatgttcttaagctcttcttgcttctgttctcatttatacactggggttcctgatgttgggataatgagaaaaatgcccaccacataggtgatgtggggactttaatgtgcacatatctagaaaatccctggagtgacgcagaggacataaatggtgtgggtaggcattcagggtgtcctaagttagatcaacgttccctctttggcatggccagctctgaggccatggtggtgttcacccaactgctgagatgagaagcctctagcttgtgcccactgcactgggaaaggatgctggagacagtggctgtgtagacagtgcaggtagacctgttccagtgtgttctgagcatcaggcttcctttgtgtccctgtaaggaagccttacacctagttagactgtaatttgttgttgtgtgtgtttgggtcctggaacttgctctgtagactgtgctggccttgaacctatagatatccatctgcttctgtttcccaagtgctggaattaaaggtatgtgccaccatacctggccttagacagcatttttttttatgcttctatttgtttgaattatagtcttacattggttacttttctccttgtgacaataagaagcaatttaaggaagggttgtttttttctagtttgcaattcacagggatttattctatcatggcaagggcagacatggcagaagggagcagccagctggctgggcacattgctttagcagagaacaagaagttagacaaaactataatatctcaaagcttgccccctttccctgcagtgactcacacccttcaacaaggtttcacctcctgtagttgctaccatcttcccaaacagtgctgccagctggggaccaagggttcaaacacacgagtgtgtaggggacaccccatattccaagcacaataactcttatttaataactttaagtagctaatagaaattaagagtcccttggtaataaatggctcaggtgaaagttaagattaattatttgtatgaagagtaatatagtgagatagatgataggcagatagatagatagatagatagatagatagatagatagatagagaaatatatattcctggatatgtacatgcttccagtcttctcctggaatatttatctttatgattctcatttatgagataatgtaagaactgaatttagtttgattaaaaaaaacccactattaactgctgcttcaatcttacagcacagcaaaccagacaacaaacactacagacccagtgttcaactaacactaagaaggatccagtgttcatattggccaacactaaggatccagtgttcatattgactaacaatgaggatctagtgctcctttcctaacaccaagggtccactgttcatactgactctctttcagaaacttgtagattgtttaactgatgctgcttcttagctgtgtctccacaggcctcagagctcactcaaagaccattcgagcttcagcctgttctggagtgaaataccacttctccttccacagtggagggttgggcagagtgtgagagatgaattgttcattcattcattcattcattcattcattcattcatttaaattttacctagagttgactgcatccttgctcagctgtgggagttgacctgactggggcagtgaggaaatgaagaaaggacaaacacaaggacacagaaaatctgggactgggtgtgctgcattttctaatggagaagtcttagaggcctggaagctcagcttgtttattatatagagttgaatagagaggtggtgttattgcacacaattgaacaaggaagtcagtgtgtgtgtgtgtgtgtgtgtgtgtgtgtgtgtgtgtgtgtgtgtgtgtgtgtgtgagtgtccaggagacttagctaatccctgtaggagcagtctctgtaggacagtggttctcaacctatgggttgaggcccctttgggggtcaatgaccctttcacggaatcacatttcagatatcctgcatatcagatatttacattacaattcgaacattagcaaaatcacagtatgaagtagcagagaaaataattttatggttgggagtcaccacaacatgaggaactgtgttaaagggttgcaacattaggaaggtggaaaacccctaccgtaggggaacagtcttcaggctgtcaatatccagggggagacacttttggtagacacttcttgcatacactgtcaacatccacactttgaacatccacacggatcactccgagactcacccagagagagcttggccagtcccttgggtctgaggcgtgggaaccttgacaactcaacagtatacattcatttggtattcactagcttcacacatgtagtaaaatttactcttttcatatttattatttgtttttaagtgtgtgtgtgtgcatgtgtgggtgggtgacagtgtatgtacatgcgtgcaagagctgtctggggtggtccgaaagggatgtcacatgccctgggactagaattacaggtggccgtgagctgcctgatgtgggagctgggcagccaacttgaatcccagctcagagcagcaagtgctgtgaactgccgagccatctctttgccccttcactggactcctgcactgcacagttctatcttggtatataataaaagacacgtcttcactatcacactaacacagaaatgttccagccagccaggatattcccattgtgtctgtttgccatgtcatctacttgccagtgccagttttgctcagtctctgccactttgtcttttcagagatgaaatatcgaggcttgtagccttctgtgcccagttaaacagaaggcatttgaaggtcatccatgtgttgtagagatcagaatttcattcttgtactttcaaattgtgtttcattctgtaactgtactagaaatatttaaaagctttccaacggaggggtagactttttaaaaaaattttctaatagtgagttaagcattcatatctaaaagaaaagaaacaaccagacaaccatgcagacaagtatactttaggttgttcctttcgaaaattttgattagagagttttacccacattttctttcttctctcacaagaaaagccatttccaagcatccacatagctgttctcttttggtctatgaggacctttgacagagggagcaatatttagagtgaccgaacctgaccccattagtccagtcctcacatggaaaaatctgtcttcaaattcttgctgactcaaaattgaaagccatgtttacttgtgaagttaataaagctcccaaaggaggaccaaatatccagatgtttccatcctctttttcaaaaaaaaagagacgatttatcttcctctgaagatgcatatctagttcccctgcattcagccatataacaagttcctggctcattgaaatgctgggaaccttggcagtgcatcacatatctcattagcaaagtaaaagtctattcctgggaagagatgttaaggctgccaaaaataaaatctgtctgtcacatgggaatgaactgtaagggtcagctaacctcgtgttgcaccgctaagggttcccttcagtatggagggcaacggacctgggagtgcatccttctttgaagctccttgacataaatggggttcgggcagtttcagatacagggtaggtgtaaagggttattttttccacctgctgtttgaggctgaaactgtatccctggtagggacagaactgcaggtcaaaggaggacagttgtgaaattctcctggatcgagactggaatggaatagcttccccagcaactctattcagacagcagaggccctgcgatctctagggtttcaatctactactgtaaccggggcagggaaagcagagggttgcactgcatggatgacgaaggagaacatgaaaaagagagctattcccactacactcaatgggccaatgggccccagagctgacgagtgtcctgcactccagtacctcatccttctatattaactgtcttacctcttagaagttgaaaacctttgttcttctatgaaataatagaaacactcaggatttgtggcatcatcccaagtgcctgtgcagaaaggggtcaattggtctgttcctacagtaaccaaacatgttgcttggcatcataatcagatgaatttctaagcccattgttctgatatgatgttaagagcggagctgccagtgtttttctgagcaccatcatataccaggtcttcatgggtcttcagaatctcgaatttttgactttccacaattgaaccacaaacatggccctgggctgacaggcgtggaggccagtatctgactgtggtgagggagtgtgtgctctgcccatatgctacccatagggctggctctgtgttttcaagttgctgtacaaaggaatatccttgcagtgctgactgagtcaaggctgtgaataaaacatgactgtagaggtatttccaaggcttttcaacacagctctggaaccaatggtgttacatgttccactaggggaaagtaggtaatgttttacaggtgagacactctggtttttcagagacaacggttctttcctatgggatttatgcctcagttgagcagctagactaagaagccaatagcttctacaaagtggaatactcaccatcacagaaatatgtccccagaggagggagtaattaaccttgaaggttaatggggggaagacatcaggctccctatttacccctatgccattctccagagacagactctttctttgaacctggaactcagcgggcagccagaaagcccaatgctttccctgtcattgccctgacaacactggtgttagaagtgtgtgcacacctggcttttcatgtgggtgctgaggactccaacttaggtccatgtgcctgtgcagaaagggatctaactcatgggctcatcttctcggcttttgaaagctgcactgcagagaatccagtatgccatttgtcctccagctaaggcagaggtctcctcctgacgccttcttctggtctttccccaagtgctcccctgcttcagagccgcttcctttgtgtatcaatatccaaattgccattcaatccaaccaactctatggcttctccctgttggcaatttccttgagacataatttaggtagtggttgaagttgtgggttctagattttagaggcggccttagctctgaagacaggaaaaagagatgtggtcacgtatgttgttcggggcttcactgtgtcttaaatatgtttgatgggtacgtttaaagcatagttctttctttatgtactttgatgggctaagtaatttcataaaagacaaggaatctgtcactggttaaatgtgctaccgggcacgtactacatctttatggactagtgacctagtccctagtgacttttttatgtgagccatggaggttaattcttcattgcaccctgcctagacctaaaccttttgcaactgttttctctcttgacagcaggaagtatgtattatctttcttcccagtaacctagcatggggctgaggacctcagaaaacgttaaacacacacaggctgattgatgggcatgattgccttaaagatgaactacgtaagactgccacgttttcccactcatccttgtctgaacatctgcagccgaaacctgtgcatgtctgttattctcctgtgatgtgacctgtgagaagccaccttggcttgaggttgaagcagcagaaggcactcttgttcataggctgtcccagggaccccaccccctacctcctctttctattcaaccctggagcagctcccaataattcaatatgtatgtgcatgtatctccttctcaaaacagtgttcttaaaggttccatttgcttgtttcacactttaagaaaaacctgggctaaccagttgccgcatagccaagttctaattggtggtaatcaccttagtcttggcaagaacacatcatgctctgcttgaagtcagtatatatgccagacaattgaacaaagctaccagctcatcgggagccggctggagaccaccctgtcctcagttacaacacacctcccacgctgctacagagagccagtccagaggagacatgctcatgaccaactccctcatgcttgcctggccgacggtggaaggcgtcatctccacacaccctggagctacaagattccaggaggccaaatgccactgcagactttggtgcttccagtttggggctcagtttagagtctctcaagacctgtagtggaactgctatagtgctatactcaagtctaagtctgcctccaggtggaatgtaaattactacaaaagaatgaaatctaaagggacccaaataaatcatacctcatttgaaataggaaatcagcagtgtttaaattagtgaataaaattaattcacttaagaagtgaatacaagaagcatttaagattttaaaaaatgcaaataaaagtcaggtgtaaccaactcagaaagccccagaggctctcacttcctctgtttctacctagtcctgttttctaaatggcatcccaactataatgaaaaggcagacaccctcccatccaggcaagtaccacaaagacctctgtggcctggggaattccaccaagtcaggtctgacttctgtcaattatcccagatgctgaactaattggactgatgtttagatgaaagaatctctatctatgaagacaggaaaagcccccttctgtgaccagagccattaagcatcaattaggagacagttggagaaggtgcggatgagtcgatggcaattactgggctttgcctgacagctcagttcctgaagcctgggccaaagcaggtgacatggaaatttgatctctggacagctgcagacagaccaattgcactctgccagtcagacctcccccgccgctggaagctctcttcagcttgtggcccttgcaacctactgagccagcctcatgatggccaagcacacagccacccagccagggctgatgtctcctgtgctgcttagtttctgttaacttgacacaaactagagttgcctgggaagaaaggaacttcagttgaggagatgtttttcataagattagcagggctttgggacatttcttgattaataattgatgttggaagatgcagtccactgtgggcggtaccattcctagtcgtgtaagaaagcaagctgaaggagccattaaagccatcaagtaagcggcactcctccacggcctctttcattttttgccttgggttcctgccttgaattccctagatgatggactgtaatctgtaagatgaaataaccttttcctccccaagttgctttgcttgtggtgcttttacagcagtagagaagtaaactaaaatgtctatagacatgagacactgagaccttgttggcaggaaatgagtttgggaatggcgttccttgtcctgacaaggaatggctctagataagacattgtatccatgcttcagatgagttttgaaccacaagatatccttcctaaggagactcagaaggtgctggctcggtgtattctctagaggcttcttaaggctgtagtgattattgtcacccacaccaagaatgctttgaagagacggtggtgccactcatgttgctacagagtaaattgtgtccttcaaagtcatatatcgatacttcccatgtgcctttccccagaccatgaccccattttgatatcaagtctttaaagatgcaacttgacttaaaatgagtacattagggttgactcctaatccaatatacaggtacatttatagggagcggtcaagatgctggggtgtagcttgattagcagagtgattccccccgccccccggagtgcaccataccctggttctataccagcactgagtgaactgcacgtttctaatctcagcagtggagaaatgcatgcagaaaggtcagaagttcaagaacatcttcagctgagtttgagtccagcctgggatacattaggttttgtcttaggggagaaaagattaggacacagaggaagagacaccatgatgctcacacagagggatatccatgtggacaggcagtgaggtggctatctataggcaaaggagggagaccatgggtgaccctaatcctgccaatgccttgatttcacactttgcaactctacaattataagaaataagtttctatttaaaccactcagcctaatattttgattggtagcctagcacactacatgaattcacctgaaacctgtctgttgaacctgttctaacatgccagagggttgtttatgtacagggatgtatggagatggcagtacagtgttctgaagaagtctggccttgaacatggtccatatcctgacaactatcaatgtgttgtcaatagcgagtatctgtaagttgtcatgattccctgaaatcatcgtaggtaatgaacataaaactgttaatagaatatcctaactataattggaaggaatggtttagaaataattgtcttagaataaatgcaatccataaatatgcaagttccatcagaagataaaatggagtgtccattgtggttcagttgtcatcactaaatgatttgctgatataaaactagctttattcacttatggtttagaaaatttattttgatctctcaagttggtatagtaaggctgtgttcattttgagagaattgtcaaatatgggggcatttctattaaatttctttcattcatgatcttgcagattgccttgagcaggtcatcttgaacaatgactacttctcagcaatgtaaagtgtcaccacttagcagccactacctacatcctttggtgctgggctctgtgagatccgtttatctcactgaaaaatgtcttcctttgaactacatcacagtttcagagagcatagaattttccagaattcataatataaatggtctctggaacttgcaattattttctcctcttctaagacgctccttaaacttttggcaggaaggtgttctatagctgttccttggggctaagcagtccatagtcacctatgctatgcaccttgactgattgtgagtccctttgtaaatttccctgcagctatatggtaaattctgcaaagctcattgtatttatgtatttttatttattatttgagaatttcatagatgtatacaatagattttgataatattcacctcaaattcattcctcccaattctccccaactctcccctaaaacatccatttcacaacttcatgcccttctatttttaacccctgggttcatttagtgctgccagtatttcatgggtatgggtctgttccttggagcacagacaacctaccaggagccaataaccctaaagtaaattactgctccacctccagcatgccttcatctagggcagggcctcatgtgctcctctcacaatccaggctggaatccacagacttcatcttgcacaggtcttgtgcaggcaaccacaactgctgtgagttcacacgttcagtggccctgtcatgtcctgaagacacagattctcggatgtttcatagaaaggtccccatgtttgacagtgtaaacatgtatacacactgctgggtcctgtcaggcacacctgggagaggccaggagctttagctctcacttaactaggaagtgtttctgctgagctcaactttcttgtatgtctgactcaatagccaggaaagtcccagctctgaattcaaattctgattcctacatgggcttccctgctgtgcactagggaaacttagaatgcgtgcaccacatgccctgtttgtttgccatgcactgcgtgccctttgtctgaccctttgaaccccagctagtctgagtctttatgagtctttagatagtcctgtctttacttccctaaaaattgttgtgaatgttcccaactattcttaaatagttactatgggctgctttcttatgtatacatatacaatgtgcgtgcatgtgtgtgtatgtaataacatgcttgtctgtaccttggtatgtgtatgtgtatgtatgtatgtatgtatgtatgtatgtatgtatatgtatgtgtgtacgtgtgtgtgaaattttagctatctgttcctgtccttacttggtatgtgtatgtatgtgtgtacatgcatgtgtgatattgtagctatcagaacctgtccttaccttggtgtgagtgtgagtgtgagtgtgtgtgtgtgtgtgtgtgtgtgtgtgtgtgtgagatactgtggctctctgtacctgtcctgacattgaattagtggatgggaagccatctttccagtctgttctctccatcccacactgttattcctgagaacatggaacctttaccagaatcattctagttttttcttcatctataatactccagtgcccctggtcaataggtagtgacctccgctggtagtaatctccagtctccctcttcctaatgccttttcttgatcttgtatctgccatcagtcacttctctgttaatctttctcatgggcaaactccaagaataattaatacttctatttatatgatccttacttccccgaagttcagaatttccactggacacatgactttagattcccaccagccattgttcttagaagggttgctcagggtgctctgcacagcatttgcttggtcctcctgtcttctaactccatggttcttccattaatagcactccaggctgacctgtgcctgcagctacacactgtgtaaagtacctcaggttgacctgtgcctgcagctacacactgtgtaaagtacctcaggttgacctgtgcctgcagctacacaccatctacagtgtcccagactgacctgtgcctgcagctacacactgtgtaaagtgccccaggtggcttatgcctgcacaagtcaatctttggagctggtcttattcattggcttttccatggtctctaaggtccagcattgacttaatcacgtttctcctaatttcttttatttctggtgtgggaaatgacacctacatctgtcttgttaagcagttcagagacatgagaagtgttgtagacccctcccacacccatcctcctggtgccatgggtcactaagtctgttgatgctatcactttgtattcctcactgtcacaactcccacagtctaattaattgaaagcctccatcatttttctcttggattgattgaatactctcctcaatatctgccagtaatttacaatcctcacagtaatccgtccaaaccacacatgcattcatttaataagtctgcccctttctcctacctagaatccattaatccctatagtccttgagataaaattcacattccaagttcatatcattctgttctccttttcccagccaaatagaaatgttttcaatttcccaaatgtgctgtgctttctctcagctttatgactctgctttgcttggaatcttgggacttttcttcattgtgtgactactaatcttcacttaccagacacaatgcacatagctctttcccaggaatgatttaagtcctccatctaactcattctgttgactgtctttcttctgtgctctcgattcattcactgagaaagatgaattgaatctgatatttctacctatctagctacctataaaacatttatctacctatctatgtgtcttagttagggtttctattgctgtgaagagactacaaccacagccactcttataaaagtggggtggctcacttacagatcccaggttcagtccattgtcatcatggtgggaatactggcattgcaggcagatgtggtgctggagaagtagctgagagtcctacatctttcagaaaacaggaaatagtttgtctcacttggagtagcttgagcataggaaacctcaaagtccacccccacagtgacacatttcctccaatggggacacacctactgtaacaaagacacacctcctaatagtgcccactgggagccattttttcaaaccaccatattatgaatagtctatttattatttgcttatctataaatacctacccataatctatttacttatgtatcacctatctatgaatacctaacatctgtctgtctatctgtctatctatctatctatctatctatctatctatctatctatcatcatcattatcttatctaacctatctagtaaccatcactcacctatctacataccattatcatctttatcttatctatctatccatccatctatcatctatctatgttaactattttatcatctgtcacttatctatttatcattataagcttacctaatctgtctatcagttaaccatctgatagacacctatctaccattattatctattctatctatctatctatctatctatctatctatctatctatctatctatctaatctatctatcatctgtccatctatctatgttatggaatctatttatggcattgaattatctagttgatattattgcatgatatttggcaccaggaaagtaattaagaccaagaaacaggtcttaatcaattgcagtataagaaacacaaagatggcaaggagcacattgtgctaacccgcaccagccctgtgtgagccatggggctttccaaagaacatgtgtatgaggtgatgtgactgctccctcttctggttgcctcctccttctccatgctcccaccagtcatttctacatgaaagaagttaacacaagtttgataataaaatcatctgggttatgaatgtctgtagtttaacataatctagaccctgcctgttacagacaaggaggtacatgaaactgactatttgagttaatgtgtttagtagggtttgtcaaccctgggaaaaaaattacatcaaacccaccaggactaggaagcccagacccaagaaaaagatgaacatgtactgagctgtattttcagatcaaaaaacaaaacatccatgcttgctttagtccatgaaggcaccatggaagtttataaaaatttatactattcaatgtggtaaaatacattatcaatggaatgaaaatagagagaaataagaagagaaattgaataaatctgggttaagattattacatgtaagtactagaaaacaaccacaagacttcttagcatcccaaacaaagaaggatcttcattagtcacagttctctgtaagaaaaataaaacaaacacttgctcataaaggaacatcatttgttgaaagaaagagaattcttcccattcgtgtagatactgccatgggatgtggtgtacagtgccctcagcatgatcctctcagacaagtgggcctgtcttatagcatcctttgttgtgtgggggggggggcggggggggggatgcagatcaccagcggaccagtcaataaaagctagtctgcaagcccagacaatcccacggctttagcagaaaaccttggaggtcggagtcctggttctgtcaaatgtgaaatgtgtgaatttgttccactttcactccccaagctgggtcatctaaaaagattgtgatatcagtactcaccatttggatctaacagctaaaatcgaaagtgtccagtacgttaaaagccagcatctgtggaagtcttacaggcagttttctgagcattttgtgtggatgacctaactcggtctccacacctcaattccacactgtcattattctcacttcccaacgagatccgagatcatagagtttagataacttacctaacatgaagatcaaggaagagaggaagggagctgtcagctcatgagtgcagaggccctgtgtataaattgtcctgttctagatgaccttgccattttgaggcagctctctttgaaaaccctcttcacagcctcacatttgaggccaggcttgtaccagcgtgatctggtgtcagatctggagaacagatttctctccatgagcaattaacgtgtggtccctctgctttgccaaaggcagctttggtcaagttcctctaacaaaaatcaaagattttatagagcaaatagcgggttacccatgaggacctcaagaaaagataatcttgtgctcttctaactgtctgtggtaaggaaagccccttccccctcacctcctttatttagttgacagctgctgtctaattggcctgctggatggcctctccggttcctgtggcagacagcatctggttggagccgaagatgaagctcacccagcaagtctcctgtcttttcaaactttaaaaatagaccgtcaagttcttgagccatccaaggagctaatggttaagagataggtctggggtctccagagtggcttgtgtttcctattaaacatgttgatgcaagcaagagcaatcttctgaatgctatggtttaaacagaatggcacatggttgctatatgaggggctgaatcctggttataaatcacagtaatgacagcctgaagctgagctatcacagattctcaagtctccgaagtgtggcctggctaagtcattatggagcctcatctcagatagcagaattccacgcctccgtgctccagtgcacacctccctataatccatgcctttgtctccttcagacattttaaaaaatgattttcctccaagttctgtgacctgactaagggttaaggaggattccatattccacaccccgttagaggacgctggcagcttagcaaatgaaggcactatgggcctacaagtatggaaacctctctggggccacctcatgaccccatccttacctaggtcaccctggacaaagcctggaatctctgtggcttcagtattactctcagccatggtcttgatatcagtgaaacatgggaaatgaaggagatggcttcgaggactggtgtcaaggcgaaaatgctccttcacatgttttttgggcaaagtcctctgtgaagattattttcgtcatgagagtgattaatgtcatgtgttggccagggacagagtagtgtaccctgtgggaggaccttggcagaaaagtggaactgagcccgatttaattttagaaatcttcaatgttgcagaggatgacaagggaagctgggctctgccaaggatgaactaactacctgagaacattaagcccccaaaggaaagctttcccatctgccctctcccctttcctgtttcccgctcatcacctaacaggaagtctgcctctaagcatgtccacccatctgcatgacgaaacagacaggttcctccagtgacagagaaaacaaatgactgcagtgttctagtgtggtttctgttgttgtggtgacaaactctgaccaaaagtagtgtagggaaagagaaattaggggttatatttccaggtcacaggctgtcgctgagggaagtcaggaattctagcatgaacctgaagcagaaaccatggaggagcactgctcgattatttgcctgtagactcatgtttgttagctttcatataacaggcccagaccacttgcttagggaatggtgccacccacaccgtatcaagcaacagtcaagacagtccttaatagacaagcccactggccagtctaatatggatggttctccatggagattcttggcaactctagactgtcaagttgataatcgaagctaaccatgacctgtagtgataaatcagattggactgtgaagaataatctgagaggtagtcactaatattatcaggatacaacaacaaagatactgctgatgagagagagagagagagagagagagagagagagagagagagagagagagagagattaaaaagaagaaaaatatctaaatatctaagtatctttggaaagaggtagaagggagtttcaacaaaataagaatagattgtgataaccttgtgtcaataaaacaataaaaaagacatttggaaagttaatacaatggtggtctggttaccgattcctaaaaatggaacaaagtgggtcgtgtaatagagcagacacagaagacagcattagtgagacacattgtaacgaaggggattttagtgagacattttgtaatgggggaattctttagattctaaagcataaagtttggcaggtcatctgaaaagaaatgagcagcatgaaattggtgacagtgtggcaatccttaataaaaagtctaggatatttcaactaaacaccaagaaaagtgatggctataggctggtaatgctgtagttttcaggaaaggggaaataagatgttgaatttttaaaaatgtaaaatatcagtgattgaaatgttaaatattggagttataaagactagaaggtggaacattgaagtcatttgagaggaagaccagaacctcagacaagaaaggaagagaaaacaagacaataagaaagtctgttgctctgaacaacttcgcacacacagggccttagacaggagacagaacctcccaaagtctcctttacttcacttgcaacatggatcataagggtgctgtgaacactgagactcaaaggccaacagtcctgggaaaggcttggtgtactggaaagtacgcatatgtgtcaactattaatcaagaatattataaatacaggaagtaataataaacaacttttttcattttcactattttaaatgtttttaaaaaatcaaattttatgtgtatgaatgttttgcctatatgtgtgtctatgtatcacaagcatccagtggcgaccagagagtgatgggtccactagaactggagttatagagcattgtgagccaccataagtatgctgggaataatgctcttatactccacaagagcagccagtgctcttaagtgctgagccatctcttcagcccttatttattttcaagaggggatcttgttgtgtttgctgcctggctaaatgatccttcttattcaggctcatcaatgctagaactgtatacttgagccactgtgcctagaagtagagtaataaataacttcaaacagccaggcggtggtggtgcatgccaggagaggcaggcagatctctgtgagttcgagaccagcctggtctacaagagctagtcccaggacagcctccaaagccacagagaaaccctgtcttgaaaaaccaataataataataataataataataataataataataataataataacttcaaacaacagaaatgagcccagatagatcaatatcacagtaaacttgaatgacttaaatttccatgttaaaacacaaattgaatgtagatatcatgctgattcctggaaaactaccagaaataaatgttatcaaatcattggaaatgaatatactggcaaattcagtgactgatagtagaaataataagactcaaatgagaactgcttcatgaacatttgcatttatttcctgaacacccatgaagtgtcgggcattgtaagaatgctgggattatggcactagaagcactcattttctgccttcccggaacttcagtctagtgagagaaaacaacacacttacgggtgtatgagtacacctggcgctggatggatagaaaagagaagaacgcaggcttctatttgggcagagtgggaagggaagcctttctgagggaattaccaggatagggtgggcacatcaggtgactcttcaggcaaggatgggcaggaaggatttctcagcagatacattaatatgatgtacacagtgtgagcctaaaataaaggttctgattcaatagcaagccacccagacagcacagactgctgtagattccaggagaaatctagacatacgccgatgagtgagttacttcaacactgtggaagactgaaaaatgtcatcatagcatggaatgtattttcaaaagttgaattaatagtgttaattaaatgtgtgtatatgactagttaaccacgaaacaggaaacgtatcttttcctagcagatgcggagtatgttttaagaatgagccctgtattagcaagaaaaagggcaagtagagaaacagcttattagttcagaatttttgctgcttttccagtggacccaaattttattcacagcaccgttattgggcagctcacatgtatttgcaaccccaacttcatggaatctaatgccctctgtgggcactgcatgtgtgcatgatataaacacacacttagatgtaaataaagatagattttattgtaggagaaaataagtgggaaacctctgacttattttaataaataatatgttctcataaaaagaccaagtattaaagatgtgacgtatttgcaagataattttctaactaaaacttggctaaaagaataaattatattcaaattacttatatattcatatatatgcaaatgaaatgatcacatctaaaatgtgtggtggtgttcaaatgtaaatatcagtattccaatgactgattatgtgttatttatttaccttttagaaaacaagtgtgaacatagagctagttagtgctcaacgaatgttatagaaatggaaagataaatctataaaaagcaaataaaacataataaggaataaaagcagagattaatggaatatgtagttatgaaatgaataaaaataataaaatgtatgcttcaaataaaagacttaaagaatagatttttttttgagagaagatctcactttgtagctcaggctgtcttcagacttagtgtgtagctcaggctggccttgaactcatgatcctgcttcatcctcctgagtgctgggattcagattgaccccaccatggttggtctcgaaatgtttgttcttcttgtctctctctcttaatcttgttttctgtaagttcttctatatccttgatctgaaagggcaattatttctgtaagtctcatctgttattagcaaactcttgccctattctcacttcattatataaatctcccgaaattttagtttaaattgacagttgtaacatctgtttctttatctcttggttaacgttggcacttaagtgaaccgtttgcttaattcctgtgtctctcatcacattcttttaagacttatcctttaatctttatttgcatattttctccagaaatttctctcaaagtgatatgtcctgaagtccatatgctttggaatatttttattaatcctcacatttaaaggacagtttccccgaatataaaatttaagaatgtgagttattttctttccttaaaaattccacttcttgagtccacatttctggcaagttatatgacataaattttaatattttccaccgtgggttattttttcctcttcttggaaacattttgaatagtgtttttttttttatatctctgatagtcttagattttactgtaacatacttaggcacacaaaacaccttgtccatctgaggttttatcgttgctcagtaattctgaaaagtttctcctgattacatatgtcctccattccacgtctctccttttagatttttaattaccaaactatcgacacatctgctttagcacacttgtggcagttggtgagcatcctggcacccagtttctgatttggtgggaagaacctaggagcagtttcaaagaagttcctctccacggggaattggaactaccagaaggcacagagctgagccaccatgcagttccagcttctgttggcccctgtggccagctcccagccttcatcacaatcatgaatttctccacaccaattagcttttcctatgtgttttgtttgtttgtttctcagggtgagcttacacatgctaggctaggccggtactctatttctgaagctacatcctcagcctcaacctaatcttttttcttaaggggaatttcaatttgagcattcaactatctagctctaaagtattatagattctgtcatttttttgccaccagttagaatcctttttcctacccatgatacttaaatatttttttcaaaaaatctgctatagaatattgggcctccctaggatttttacacatgtgagtcactggatttccttgtagtcagttcatactctcccattgcccacccattggccctttctcaccttccaaatagtgctaccttcatgtcatattctaactttagttctcaaaggaaaagaaatcaggtgacatttatctttcaagtcgggctgcttttaattaacgtgatctccagttccatccattttcctgcaaatgatataactatttttattcacgactgaatcatgtatatattctttacccactgatgggcatctagattgatttcatacattggctacacactttttgttcttcctattaccctctttttatatgatttctcgtttctattccataatattagcattttagaatattttcttttgtttactccacattgctggattttccatctcagtttaagagttactcctcttgggttagttgctgtttatttcggggtagatgaatgcttctggtatatacgtctgtcagcaagctcctgtctcccaggatatgtcacctacatactcaggcatgaagcttcaggggagggctgagggctgagtcctggagtatttctttcaccctgaaagttagaggagagggatgatgttatgtacctcggagcgttttgacattaccaactcatgaacgtagctcattttccctccacacaaccaagcaagccctctatgcttggagcaacggcccatccttcacgaaatgattttgtaatttacgataattggtggtgggggagggggtgaggcgggggggggggtggtggtggtggtggtggtgagagtgctggctaccaggccagcatcagctggttctcatctcacacaggagggctttgaacctctcctgatagtacctgacaggtggctagggctgcctttggggaggggcataaggccttcagtgactatcaggggccaagaggaggacttaaaaccccttgaaaaccagcttctaacagctgctgtttgcagctctgcgctccctggcgtggcaccagcccctctgcacacacagttgcccatgctctttctttctccccagagctttctcgttttgtttgttgagagttttccgagacatctgtagtttttccctagttggttgttcagacagcaggaacaatgcgactttgctggttcctccgtaacgtctaccatttagttggtaattgccatgtggtagttttgatcttccatggctctgttttctttctgcaaacatttttattacggtaaaatatacataacatgagaattccactttgcttcatttaatcgtgtagttctgtagcattaaagctcattgcttgtcctgtgcaatctttctatgaatttatgaatctatgaatttataccatacatgtcttgaaaaggtttcataaacttaatgccacctctttcgtgatgttttaattgtagtaaccatgtgtttgctgtctcacttatgctaccgtattttaatcgtgtttaatggatgtgccatctaccaacgtatctctgctgaagaggagattataaccctgaagtattttctttttctcctgttttccttggaatgtcttcttcatgatggtgcctgtccttacgtttgttcatcatatgtcacaatggagaattgaaataattttaaaaatagaattggtggtttatctaattatcattgtggtgtgtgtgtgtgtgtgtgtgtgtgtgtgtgtgtgtgtgtatgtgcatcagaggttgacttagagtatctttctctattattctctaccttatttttgagagcccctccctgacctcggtgcgcactaattttgatcgactggctagacaacaccatcccaggatcctcctttctctgtcccaccaccactagggttacaggtcaccaccatcagacccagtttgtaccctgacactggggaccagagctcatgtcttcatgcttagtcagaaagcactttcctcagcgagctatctttctgttctcaatttttttctaaaaggtaagaaagaaaagagcaacatttatatagtcataaataattcagtaattgtattaattaccagtggattaaatatcacaaataaaatgctaaattttcaagctagacatgaaaagccctatgttttgcttatagatacatatttccgatactaggatagaaatattggaaatgattcaattcaaacattaacagctaagactacaggttagaaagactttgagggctgaagagagttaagagtgtgtattgttcctccagaggacttgagtttagtccccagctgctggtggctcacagctgctgtaactttagctctgagagatccactttcctctggtctctgagagcacctgcactcatattgtacacacctctacatggacacgtatacattcacataattaaaataaatcattaaaaagaaatttttcagcctgattagcatatatatatttccataagcaaaagaatattgaaatgagctacttttctgaatttcaatgattaccaaagagagctgaaatatacagggaaacagctatattccctctctcttccaatctcaggtaaataaataacattattatttgctttaaccaaccttttggggcatacatctacacttataccaatttttgctttcaaaaaagcaaatcctaagaggaaacccgtttttaaaaaaacaaaacaaaactgctagagagtcttagattattgccatggtagcaaagaaatattggctagagataaaatccaacctctagccataccttgataggtagaccaagtgaccaccagtattaacattgaaagctaatgtaaatcttagtggcttctggtaactttttgttttgttctgaggcaataacagaattctgtggggaagaaagtcaagcacgaatactttcagtaaacagaagaaagatgcccaaccccagggccaaaccctaaagactgacagagggcaggcattgggtgtaccatctggccaggagttcagtgtgactcaactttcctaagtctgttcttgggaatgttgctatggtccacagaaaggcctttgcagtctataagatgcagcctttaactctttaactacctttgactcttaagagttgtggtgagcaaagcttgcaggctcattccttctggggtaaacagcctaagctttggtggcttcctcttgccatacagctgacagcatcagtactcaaatatggttttctctgcttcttccagatacccatatatctgtatgtgggagattccccttatcacgaagcaaacaagcacaacattatcaaaggcttactgactcattgtggcatattatttagaatagtggacaacagataaaactagtgcctagagtgtaaattactccatgataatatttgcctggatgagggccaggcggtgattattcaatcccaggcccatcggaggatatgggcactcaacagaaggccaaggaaggaaggagtgattgaacaagaactattttaggagtctctttcctgtcagccttacttattccatccaattataaaaactaactgcaggctttagatttcaaaataggaaaacagccctgtggtttgcgctatgaccgagtcaggactcactttgtctaactcataaaattgtggaaatcaaattatgtggactaaagccataaaaaaaaagaaaggaaaaagaaagccttctggccttttccatgtggtttgtttactgggttatggctggtttaatcttatcaggtctgctgtgctggaggctcagagcaatcttccttaagttcatctctcagcaggcaattccctactccagctacctcattaatgtcaggattcctgaggtgacaagcttgccaaactggggcattatgaataaaaaggggaggagagagagaaagagagagagagagagagagagagagagagagagagagagagagagagagagagagagagagagagagagagagagagagagagagagagagagagggaagccatgtaagatagagagcatgccttgtttcctgtgtatgtgcccatatgtgcttcctcttgtccttctaactcaatcaaaataaaaggagacatacgtcctctaaagagaatgtgcctagagccgatattatagtgcagaggagggcgaaggacataacaaaaagagaaagaaaaacacgctgggatgttacaactgattactccgacgtcttaagggttgagtcctttcctcagtgtgttgggactgagtgctgtcctggtgtgagggaagcaagggccggttttggagcggggaggtggtgtagagctgggatggcacggggaagggagggaggaaggatgtagttttctgacttcagcacaggggtattgagttatggagtcattgaacactacctgagtgcaaggactgtatttcagagcctctaggtgagtgtgccccgccaaggcaacaaccacagtcccacagctgcactcagcatggagtttgatctgtgatcaatacctggatggatcgtctgtggctgcactgtctgggtgactcctggatagatcaaaaataagtaaatgcctcattgcaaacagccacagattggcacttgtgcagctcttaggctatatcgtgtgttctcttaagattctaaatgcttgaaaacaagtgaggtaacttgttaattcccagtgataactcttccactggctactattgctgatctgtttcagaagtgggaaaactggggagaaatgatttgctcaaaggcacagaactctggtgggatacaagctcgagcactctgaccgggacatgtgatgggccctgcaatatgctgcctctcagcttagagaagggcgctgatgtgtctcccccagtgaagggctggggagacagctcagtggcaaagtgtttgtagagaaaaaatgccctgagtatggacatccaacatccaattaaaagctaggtgtgacatcataggtcaatcctggagctcactagcctgccagcttagctaaaatggttccgagtcagtgaagaccctgcctaagaaacagtgtggagatggatagaggaatagataacaaaatatcaaagtcaaactctgccctccgcagatcaatgcaccccacacacatgcatgcactcaggtacatgtacacacacacacacacacacacacacgcacacacacacacatacactactcagtctacaaagaaaaatagttaactttagcccaagttttaaatgaatgcccaacattggaaggagagaggaggaaatggaagaggagaaggggaagaaaaaggaggaaaaggcagagaaggagggagtttatttgactttgctgtttatgggatttgattttcagttttagttttatgctgtctgagtctttccttctatgattccaacacgcttttgtctttttgtgtgtgtgtattcagcaaaacgaagccccagggactggccctcagacttcctagggtgtacgtgagcaatgagattcatgagcggatttgttttttgactcttcatgagattcaaacccacaaacatttaggaagaacaggagccagacagattccagaattgatgaagtttgctggtgtgactgccactgcaccttacaggataagacaggcacagttccagaagagggatgagaagataggttagggatagacctggatctgatagtgacgtccctgtcatcaacctgtcctttatgaacgcactctgtttacccagggcctgtagcatgactgttgccatcctgggacgggaaaaaggctagatcctagaaaggcctgaaaaattgtttttcatttactgtcgtggctagaatggtccctcacagccctgtgactgaggtcaccttgaccagatgtggggccgtcacacactgcctgtaggcagtgagcaggtgaactgaaatcctcagtgccttttgggcctaaggcatacataaatcacaggttttctgtgagtctgggattagtgctagactccatgctttctattaatagaccttcataagcggtgcaggtgcggctgctgccactctttgaagtaccgcttaatcgaccccttaccaaatcctcataatccaactctcataaaaagccctggggattattgattgaggagaccttggggatcccttaaggtactgcacctcagaggcctgcctgccctacaggtgtggctgcaggctgctccaggaatgcagaccaggtgtggcaggccagcaggtggccccagtggtggggtcagcctccccaagttctaggcagccctggaggtgggggctggaggagatcaagcccacacattccaccaggtccctgtgctgtcactctgaaagagcggggagttattctttgccttgcttgcactgtcctatttgaagttcagattttgggatgggtttttcttgctttgattgcttaattataatgagttcaatgggaagaattcacattgttttggttaattaaatccatctgtagctttctggattaataaaactttgtggtgggattttctataccttctatttaggctctgctcttctagccaccctgttcccaggcagggccacctgtaagactccatctcttcggcagggccctgcttaggcggctggcctctcctatctgtttcttgaactccttgtcaccttcctccttgagccttaccgagggcagttccaaggctgacccagttacctctctgctttccatggccccttttcatgtctctaggttagcactgtttggattgtacctttcatgttaccccagttgttcatttgttaagcattgggttaggtggtgaagacaacaggcaggatttgggtgctgattttgagggaaaacatggttgtgagtgccactggggtctctggagaaagctgtgaaaacaactctgaatataagatgaactaaacatcctaatgacaaacattctctcactgtaggcagggagctaccaggttttgaaagcctgagcactgtgctatcgaggacgcccaatagggtgcctgacaccctgctcccaatgctttataaatctccatagaaatattggtgccattgaaaggtgtatgggtctgacgtaggtgtcctacgttggaaatgccaacagtggatcaaagggtgtatagtctaaggtggcttactgaggcatccatcaatttcttgctactcagaaatgaggtgtgtgtaatgatactggcctcctagcaactcctctcagaagcaaatggggaaataaacactctgaggacttagaggttatgagtagtgtgaccttcaagggggggggcacttccttctgttgaacacaggtttgttctgaaccgtactacagaaaccgaaaaccatggctggagttagggtacttgggaaggaaaagggattctattctttttcagttttcctgaccaagcatttagaggtttgagatagctaaggagtatcactcttgaggtataattcaccagttctgtttttatagggaacagaactcatgtagaggacattttgcatggtttattagaaatgactcctactggtcctgggattggctactataagcggattctgagaaatgctgtcatattgagattttttccctttgccttaataaatgtggtcaggagtgaacattagcatgagtctgaaagtaggtagatgcatcagtttgcattggaccacaatgctaaagattacgaaattaattagctgctaagaagacaacgccagaggtgagaacatggaagaaatgaatagaaaggaatacctgtgcacaaatctatttacataattatctatttagacaaaggtctcagcacaccttcagagctttcgttgtgcacctacaaaatatggaaatatgcaagagagcaacacgtaggaaagggttgcaaaagctgcaaagggaagacactgtttggctactgacatcaaaacccacctctatgagaatggatttggcaatctgtcctacccacacaatggcatttgtgagatgaggtcattcaaaatgagatataaaccaaattttccccgtggattcagatacctgtgatgtgtctctgaggatgagcttagccagaccagtttattagtcctgtaatgtgctctctgcatagaggtaaagttggggttccagcagtcaagcctggcagactgtgaggtttactgtggtgtggagcctggcaatccaccaatgtcctaggcacacagttctgcctggaacagtatgactcctgccttttggttagctcaccctttgttgggaaatgagagaagaaaacaatgccagaactccctttttttttctcagtcttaagatgttagaggaagccctgttctacatggcatccagtcctttagtgattcctgtattttctccaaatttcttgctacacaactctgtccccaagttaaacactttcatttttaaatttttaatagtaagttgacgttttaatgtttgtaaatatatcgtgttgcttaaaagaagttagctttggggctggagagatgggttggaggttaaagcactggcttctcttctagaggctctgagttcaatccccagcaaccacatgatggctcacaaccatccataatgagatctagtactctcttctggcctgcagggatacatgcagacagaacaatgtatatacaacaaataaataaagctttataaaaaaaaaaaagaagttagctttgaaaatgaggtaccaggcacatatctattaagattttaagctttacacacaggttagtttaaagcaagctgtcatgtaatttttgaaaatacgggtaattattcccgtttggcctagaaattgcttccttgagtcaaagactttccccagccacatgcctctggtggatcatagctaagtttcctgcctcccacttattaggcagtgttaatgtccaactgtgtggaatgttctagaacttataagctttactcctactggaagcagagctagtgaccacccagaggcaagggctcatactggtactttccatgttccctggaatgttttctgaaacagcgagtccctaaggactctctcaacaacttaaattgtaaatttattctgtagcaaaacatacctgggtgagcgtgagctagccatgtcctgggaagacaaacaaaggggaaattaaatgttgggtggcttcatgtggcattataatatgattcccatgtgtgtacatttcttttgaaataataataaaaaataaccaaaagggagaaatgcaatcatgtcttccacaaacgcttgtaagctttctgctttgaattgcccttagggacccatttctccctccctggtcatcattgaaagatgagcaactgtttactcctgacttcccatgttatccctagctcatgcagcctctctgttaacgcccaaacagggacctggcagggtccagagggagcctcaccctctgacaccattagggacacctgaagattctatgagttgtttgctttagtcacccaacaaaggtggcagattcccaggggaatcctatggaacttctcaaaatgagtgctgttgaaggtcacctcagctcagaacactgttaatccaaagccttcttcattgtgggatccctagtgaaacataggccctcaaagcttcacctcctgggaactgaacctggctcctctggaagagcaggcagtgctcttaattgctgacccatctctctagcctagagcttcccattctgaaggaaaaggagtctggttccatctcttaatgatactttgatatgtgctacggtgacatctttgtctattccataacttcatctaaatatcctgaatccagccacgagccaagtgggggggaaagtcttagagcttcgtttgttaaactttttcactttacacgaaaaattaagagtaaattcataaaacaaatttaagggggaagaaatgacatggactctccaacttggcagtgcatgcataggattcccactgcttgagaggctgaggcaggtggattaaaagaaagagaccatctggaaaaatttagcaaaactgtatcgcaaaattagttaattgttaataataacagcaacaatgataaaagtgctggggagactgggtctagtggtgtatgctataatcccagcattccggaggtggaggcaggagagtgagaagttaaggataacctgggctacaggagtttgtgtcacatcaagacagaagaacttatatcttaacggggggggggacacacttacttagtgtgcttgaaaccttagatttacttccacaaaggtggggggtgaggcaaggggcttaatccgtgccattctgccataggatgcaattccaaccatattattttctctgtgtttgtctagtttgcttctaaagttactcttcaccttaacactgctgtcttgcctagtttgaatgtatcgatagactgtgcgcttgactaagacactgaatcatacagttaaaagttctgcatctcattacaagttctattgtacaagtcaaaatctgaaccgtttccatcaagccccttctttcctttgacagccaccccctcccctgtttggccaaagctgtgccgatgatggttgctgttagctctgcctctcctgaggctgcctgtaaatataacgtgtccctcagtgattttcaaagcataaccctggaagtccccaagatgcttctcacaatgtctgtaaggtcaagcggttttataattacaatgtgtactgctacatttcctgtggtgtggacagcacaataattttacacccttatttctcttttcttcaaggctataggaaatatgacattgtaaccttgattgagaagcaaatttgaaaatccaaatgtctttctattaaggcagacattgaagagatccctcccccaaagtagaagggcgtctttttgtgtttgtgtgtgtgcatatgtgtgtatgcaggtctatttgtgtgtgtgtgtgtgtgtgtgtgtgtttgtgtgtgtgtgtgtgtgtgtgtgcgcgcgcacatgcgcgcgcttgcccgaaggctgaagatcacacctagggtctgtcaaaatccgaagcaatcactctaccactgtgccacatacccaagcccacagtatcactaaatgtacgtgttttgacacgtttgattattttcattaaaataatttactcaccttcacttaacatgcagttacattattagtgttgtttttaaagcaaatagctatttttagtttctcatttgtaatttctggcatgacagacattgatagttacgagtcatgtgataaaagccctttgcggtcctcagtagtttctaagattggaaagtggtcttgagatcaacatttcagtcaggaccaccgttcattcttcattgttgtgaaatgccttttgcttcctatatcacaattcattgatgtattgtcttgttagatcatttcctgtttctgtcagttataaagatgctggggacatctcaggttatgaatgtgtatttccctttgtgctggataaatatttagaagtgtgattgctgcactccatggtgtttttaacactctaccaggaggttttcttatcctttccccaaacacgtgaccaccctacagttcctctatcccctccttatttttgatgttgtctgtctttcattccagctatcctgatagctatgctgcgtgtgattttcatttccccattaacaaacagcaatcaagtagtgtctgctcagataccaactggccatttgtgtatcttctgtgaaatttcattgtgagactgttttccttgtttgtcatcgtttacatttttaaaaaccagaactatgcgtggcaaaccttctttccagctctataatctgcttttcatttcgagggtttccttctgattacccgaggcctaatcagtctatgttttctgttgctagtgctttttgactgaaaaatcattaagataccccaagaccatgatgaaatgtttatatttgctttcagcagaagcttacagatgtttgttaacttttgtgtggtaacaaaaaggttgccctctttcccacagtccgaacttccatgctggactggagtcacttgtcttagcatggtattgagcacagaccctgttgcctcattgaaggaagtactgtagcttggagcatcacaaaggtctttaaaaccctcattagggtagtgcagaccgacccttatagctcaccctcccctgtgtgccagaccagccacgggactgcgttttcagcatcatctatagccaacatgaggaatgctttcttcatattctggtacctccagtttatctggtgaaatcttacttctcaagtggaatcccacccccagctgcatctgtcttatagcccctatgtttttttaaactgtctcatgtaacagtcttgactcttggagtttgtgaaaggccttcatctttgacagcactcacaggaggtagcatagcagactgcacatagtaggtgctcaaagaaggactgttgagctcattgttccaggttagtgatcttcgaaggagaaatgtctgctataggttcatgcattcgaacacctggcctccaatttgtggagttgtttgaggaggtctaaaagatgtgatcttgccagagaagtatgtcatggggggagggctttcagattccaaagccttgggccgttcccagtgtgttttctccctctctgtttcatgcttgcagttcaagatgtgagctctcagcttctgttcccacaccgtacctacagcttgctgccacgatagactattgttcctctgaaaccataagcccaaataaacccttccttctattaggtgccttgattgtggtgttctgtcacagcaacacagcaataactcatacagacttcttattggaacttctctccacatctgccatagtcatagataatatatatgctccttgatacatcctaaacaatccacaatgggatgtaaatggagggtgctctggggaagagcccccttctagccagagaactcaagctcttcagttaaccagttatcctggaagttaagtttaggtactaactccatcccctgtcactgtcaagaggcaagactgtcattgtaacttgatatcaatgattgtatagaattttctatattcggaaagaagaagaaactctttagaaggacatctaaatccctgagttgtttaaaatatggcattgttatggtgataacataccttcctttaagagcttagtgggcatgtcctgagtgttcagacctctcttcaacgtcttctaaaacctccctgagagaaaaaccaagatcatcttgtctatttccttgaaagtaaatatagtcttcaaggttacccccttagaggcagaaccagttaggaaagagtgtgatgtccccagcagtaagtgttttggagcacaccacacactaacattgcttaggctaagagagaaaagcaatttgttggcaggtcatagatttctgtacagaaccagtgagaacattagacaactgggcttcagaaagttcagaaacaaagtacttaggcagcacaaactgatggaatgtttatttgggcaaccgctaatacggggaatggcttccaacccctttctgccctgtctcagtcagctctatatttaacttccctggagagacagagagatgggctaactggcttggccctctcttctccctccccgttggctggaggggcctggggtggggagagcaaagtgcttccatcatgatagggaaagtaggggaagtttgttcccagtgaaaagaatgggcactgttaccagcaaagcggggagtgtcactataagcgcccctcatttagagttagctcatacttggtctggaacaaatgctttcctggtaagcaaggggattttggagcctgtaataaatagtgaagtgtgccttctccctgacacatatttgactacagacacagagatggaattaagttatctttagtaatcaatgtttcccagaaaataaaaatacttttcaacacaagtggtgattcacacccctaccccatccagagaaaaccaaaagtccagatgaagtagagcactgtctcagtaccttcctgtggtgctctgggctcgggtcagcgtgtaaggaagggggtgactgagcccgtgctcttcctgcctctgtaaatggatgtgtgatcccgtcagagattttatttcatttccacttatgaataagtttctctctctcgtctctctctctctctctctctctctctctctctctctctctctctctctctgtgtgtgtgtgtgtgtgtgtgtgtgtgtgtgagcaagctccctcctgtgtgcagacccacgtgcatgcatgcacatgcaggtgtccatggaagccagaagaaggtgtcagattcaaaagccagagttgcagaagtttgtgagccaccctatattgttgctgggaactgaactccagtcttctccaggagcagcaagaaccgttaaccactgtgccacccttccagctcctgagaaggcgtttgtaagtaacaacagcatgttgaaagaatgcgtgcagcatgcaaatcaagtctcagcgctcaccagcaccacgccgtgcaatcagcaaactagtccagcatttcctagtatctggatttgcaaaggatttcctggaatctgtagtcaagtacaagagatcagggcactggatcattttttttgttgttgttcatcccactgtaatgggcattgggcatcccctcaggctttggcagccttccctgctggcccaagacctcagccatcagccctctctggagagagacatcaataggacctctgctgtgtcctccatcagttctcatctgatagctggacaacagtgtggatacaaagccacgtctctgcacccgagtggaggcgaccctttcagccttcctcactttagttcgtcacctgcagatctggccataacctcggttgaaacacccttgcccagctcctcttctgcctgcacatgttgcctcaggtctcccatgggaccattgctgcctgcatgttaatctgcattttggagttggcatcctagagagaacttggcctatccgaccacaaagctggagtgtagttaattctattcatgtgtctgcatgatacagcactttctggggagatggtaactgtggagccagaactgatctgttccccaccatctctgctcctgtttggttacagtgtacattccccggctgtcctccttgcccatactcttgtgtctggtccagagagctgggtccactgggactcaatgcaagtcacagaccaccaggctataaatccttagttcctggagcaggggctgacggtcaacttatttcttgcttcttttcatgagtctgtgggtatgatgatgtacatgtgtgttgtgtgtatagtcacgtgtattcacaagacagcttaagtcttccatgatttttgtagatagaaattcttctacactgatcccttaagtttggactctattttctctaaaatggaacaaaattcagctcatggagctgatgcaactacttaagaataaatgcaaattgtgtcttctagttggagccaccatgacaataaaagccattactgttactgtcttttttgtttttcaataaaagacaaggtgtttcccaaggttccttgagggtctcagccttaacacacacagaggctacttcggttaaacataacaaagaacttggatgaatatttgcctccctgtcaaagaactggcataattgtgcagcctataaacaatgttttaggtagaactaaaaaaaataaataaaactaaaggttttctataaaacattttcatgtaatagctactttcaacttacattttaaaaaaataccctaattgaaacaatggaacccaaagcaggatgtggagagatgggtcagcagataaatgcgctggctgcttttgcagagaacctaggttcagttcccggcacctacgctgcagctgccatcctcctgtaactccggttcaggggaatccagtgctttgtgtcctctgcaagctctgcatatgcttggtacacacacacacacacacacacacacacacacacacacaccacacacacaacacacacacacacacacacacacacacacacacacacacacacacaacacacacacacacacacacacacacaacacacacacacacacacacacacaacacacacacacaaaacacacacacacacacacacacacatacacacacacaaaacacacacacacatacataaacacacacacacacacatacataaacacacacacacacacacacacacacacacacagctacagaattctcatacatgtacaatcttttaaaaagtcaagccaaactctcaacattatttgtagaaacatgtctgcgtgttcccacgcatgtaaggcacacacagaacgactgcttgaggtaaacagcaacgctttgaaggttttcacagtatctggtctcaagctcataaaaggacatgcaggaggacactcctgttcatcctgttgaggtggacactgggtgaccttctaccagtctactagttgcccaaagtcctgggacagaagagtcatgtgacatatgtttttacatttctccccagtttggtactggttttcaatgaactctgaaaatgtgattggaagtgctaggttcattcactctggctgcttccctacaatctctgccttggcattctcagaaattcagaatctagacgtgttgctgactatccccttcgtccttgtccttgagagctaccttaatagaccttcatttatgtcttgcttggcatgacccatcctctgtatcttcccttctcccacctccagggagcactgggagggagggaagtgtgacagccctgatggggaagtacttttgtgtatgttcatcatattgattgttaaataaagtactgtttggccaataaggcagcaagttagatgggactagaattcaagaaggattctgggaaatgtagtaaagacgtggtgatccaggcaggaagtgacatagcagggagactcatatttaagcaaggacaagcaggaagtggttcttttccccttctctcttcctcctgctctctgctctgagccaccatgtgatcccagggatgaggactctagtggaagtcatctgataagtcttttgaaatatctagatttatgataattaagactgagctagcagatgagaaatcctagtcattggccaagcagcatttgtacttaatataagtctctgtctattattttggccacccacatgctggcagaactcaagcgggtggcagaaagattgatcgtaacacaaccccttgtgctatgtctgagcacactccagtctgcagcacaaatgcctggattgaggttctgctgttacaagatggcagctacctcccaggctagacagaacacgttagaggggcttgttcacactgcagaggacagatgagggctcaagggatagatttctccctcatagggtcatagccacccttggcgtctcagctttcttcttcatatgttttaatggatgcctggtcatctttttcaaatcattcctcccatctgcttctaggcaaggtgtctgacaaaattgcattaggtgatacaagctggtcacaagctaataaaagaataaccagataagtaataagtaggtttttaatcagaacactatattgagcaggagatagtaaaatcccgggtaactgcctgcagatgctgaaagcccataaagctgcagctcgggtcacaatggcttcccttcccaatatgctagcctttgtttcgtctatagctttatattggatttaataaactatcacttttatcatgctcagtgtataactcctggcagtttatgatgcttgctataatcccagcataggcgaggctaagcataccgcttcatgtgtggacattttgaaaacgcaaagagtaaagacccacttcctgaaaacatttacttttactaagcaaatcattgaaaatcacaattagctccctgttccttgtagctgtgtcttctatgatgcagattgttaagatccttaaaacatacaagtagctcactggcaaaattatgatttcagcagaacccatgtggagtgaaagaaaatgagaggttacatggaaacctgataccctttgcccaaccccaaaactccttgaagaaacactggctggaaatattaggaaggggagaaaataccgctgggatcttaatgtattctgcagacgcctatgtactgggggggagggggagacagggacatttacactcatgatttgggcatttatgtgtctgatgaggtttagaaaagtctgcttgctgtcactttgcttggtgctactcttgggaatgttctggtaatattgggttagtgtgacttgaaatctaacttgtgtagacaatacccagggaaattatcaacttgtcacagatctgcttccaggagaagtttgattttttaagtctggtcacgataccttccaggggaagaaatgtgtttgcagcagggtccacttctaagagctagctaggaacaggagttaattgagcatcaatagtacctttacttttcctttctatttgcatatttgaattatagagccagtgaaacaaactttttgatgatgagtggtttgttttattactttttgtttttttcagttcaatgtcatgctaaacttttgggagacgatttttaaacctccttatagtcaagcacaaactctttgagacaagaatcatgggttgatctcctgctcccatctccctgtagacaccacagcctaggggatgtctctctggtaccattacaactcagatgattttcttggaataagactaggtatagcaaggaaatgtccatgagaggctggagaggaaggggtaggctgagtcctagaggacctcctgtgcctttcctagtcctttggactctgaaaggaatcgcattgcacttatccacactgactgctcaccacatctgtatcttatattataaactcagcaggcacttatctctgggaaagggggtgctgaggcattgataaagactgcagcactgtatcctcctctagctttccttctgacagttggtatctgtaagcgatgagtagtggctaatgggaactgactccctgggagacggacccgcctttgcttgacttttaatctcttgcctggaactagattacagggtacctcgagaaactgactccctattttgtgtaaaggttctgttttgctctcatgatttcatctctaggaataatttttaatgatcctgtagtttgagaaatacaaattctctctcacctgtttatcatctatctatctatctatctatctatctatctatctatctatctttcttcatcatcatcaacctacccacctatttaccctccatctgagatagatattaacatttatgacctaggttatttggcattgttcatgacctattgacttgagagaatgagacacagtcacacatttctgtcttggaccttggatattcaagactacctctggaaggattgtgttttcttaattatctctgtgagaaatgatctgggctcttacacaggtgggaagacagcagaagaatcaatgttttcttctcatctgaaagttaggtttcttttattgggtattttaaagaccaataacaagagacaaaatgagtgatttggacagagaagtgaagcattcagagaggtaatccagcttgctgtgatacggggctgtgtttatgggcttacttttggtttttctagttgcatattcagcatcaatgttgagaggccatagatacattctgatataaatgccaaactgctctccttttcctgtggaagcagctgcaaactcccattcttataaaataggatgtgtttttcgagttgtttctccttcactgaaatacgatcagtcatatgcttgctttacaacttactttcactgtccttttgacaggactctgctaagatcaaggtcaagggtgggattatgattatctttttgtgtaaaatgacaagacgttgtcagccacatgagtggaggggcatagtagcatggtcacgtgtctctggaaaacttgcatcacctttgagattcctgctgcaactctgcaatgattcattgtggagacacagcttgaagtgggctcagtcagtgctcctcctggagaggagcctggtgtgctgacccaaactgacgccagccgcagtcaactgaagagctgcacctggggtacttcagggcgctgtgatcttcattgcttcagacagagaatgaggacctggagaaactctcccacaatacagttgctgcttcacggggatgaggaggtctcaggaaggggtgtaagctcatgatacaaactgaaaaggctgtgcagacccactgagaaagacacaattcgacaataggtaaaatatttgcatagactgaacactagtaactcctattttattcaaagaatataactcagagatgcctactaaaaccctgggcagttctaacaacagaatataactcagagatgcctactaaaaccctgggcagctctaacaacgacaagtataatttatacttactgagcaccttttgtggtatccttttccagagtttgttttggtttacaaagcaaacatcatttttccttttattaaatttattctttgacaattttgtgtatgtttgtgatcatgattgctctcaccctgctctcatctttctctctctcccacccctgtcaatcctccctccctccaaggccctgtctcgcgcgttaatgctcttttggttttgttttgtaaaccacagagtgcaccccatttctcccttcctctcccttctccgcctctccttctcctcccttccttccgtctcatcttcctcactcctttccttccaccctcccctcttttttgtttttccttcttctcatacctccattcacacaaagccagtctccattgctgccgtcttcacggtccctcagctagaggactcccactacacacacccactgttcccctccgctcagtgccctcctctgggaaacacccatcacagcaggtggaagggcagccccgggctctttcttttctatgtcccatgagttccttgatcttttctgaaacacaaattgccatacaattccttccatggtgcatgtgtggtcttatagcacatgacattttgtccaatggcagtccccacacgtgacctgtcctgtgatattacaacagtgagaagttccaatacctgggaggtcatagctattgtcacaccacacacacctgtcactttatgcctgcagtgatgctctgtgataatgagctgttcggaagatcacagcaacctaatttaccattaaagagataatccttatgaacatattcaaatatacagtgtagagtaacgtccttggcctccacacccactactcaaacagggccgaccaatcttttatatcacattttttactgcatctgttttctctttaaaggtgtttagattcatagattcttgccattgtggtaaaattgcctacagcattaggtgtgataatctgctatataggtttgtagcaacagattaagatatataacccaggtgtgttctgggatattctctccaggatcatataagcacaagtcagtacagtctcagcaaatcctgacctatgcagaccccagtccaccacactgccagcctgcaaggaaggtacctctgggctctgggtatttgtggcattttggttccataaggctgaagagaaggtgaacacgggcttctgactcactgttcagcacctgtctttctaccttcctgcctccccactgctatggttcctgaacaaattttatcagaaggtaggtgccttggcctctgaggatagttcaaacagtgatgtgttctccctgcaagtctgaggacgtgtgatcaacagaatccatgaaaaaagagtcatttgtgatggtacacacttgtcactccaactctgggaggcagagtcaggagtagtagggagacaccacagagtcactccttaactgcttggggagttccaggttagtgagaaaccctgtcacaaaagataagatggatagctcccaaagtcttcagacctgcttgtctatgtgaacatgtgtgctcgtacacacacacacacacacacacacacacacacacacacgcagcacccaagtgcatatagctacatcagcctacatatttttaaaaagaaagaaaagacaatataaaacaaagtaactatggaagcctactttaaactcaggggaggatctggggttcaatgtgaggctgtttctgtctatcgctctgtgaggatgctggctcagccaacctctgacccctccttctgaaatatggccataaaacaatggatctgtaaactgctctgggcaattatggcacccctggagtgaaagtgggctgtcattagccacagttatggacaccagcttgccacagttggctcccagccaggctgggaaacggccttcgctgtggaggacacaggctcagtgggagaacgaggcctgttttcccgcaggtttgttgatataaatgtgttccacattagccttttcccctctctgtgctgaacaaggatcagacagagcaggtgggaagctaatggggggacgtgaaattaatactttgtttcctggtcccgcctttgttgtttttgctcagaggatttctttagaatcttcaaacacatttcgagaaccttcttcatccacgtttacttagtttagtctaagactgatggccagccatgtcagagtcatccaagtttgcaaactaagtctctccgctttggtgggaaattctctaggaacacaggtctggaaagcagaacaattaaacacaatacagagtcaaacgccagccttccaccacacagcagctgttgacccccaaccgcagggccctgcagtcaccaaatgtcagcttgaccttgatctagtcagtttgttcaagcaggagagttaggccaggcccccaaatattccagccgctcatgtttccctaatgacagtgcttttctcccggtgagaggtgagtttttataacatttatttcttatacaggtatgaaagactagctggccagagctcacttccagatgtcccctggaaaggggggctggaggcggggcagagtcaacaaatcagtctcaccattgctgtgatgggatgattctctgcttcctgggctatgtgtggtctactgcttgcctggtgtgcacaaggccttggtttgatttcccagaaccacaaagagattctttatccgcatgtttgaacttgatgaaagtgtttcaggatgactttagaaggctctggaagcttgaggtttcttccttcacggaaggttttagcaatgaagccatttcacactatacatgggagcataccagtccccaccccaactcaccactctttcttgaagtttgctgctcttctagcttcactagcccctcatcctggcccttcatctcccctcggcttctatgtagttggatcctggcttttggtatgtcagcattccggtctctcttcaggtgggaagcaattaggtagaggtcgagcctgtggacgtgaggcagatgtccctgaaataatggattagaaggctccaggctttcacctccccatgtaaaaaccaagtaaccaggaacaggtgggccacagaaactttgtgtggtgctagaaactaagaatctacactcagcaagcaagtgcctaaccaaggaagagcccctcccacgtgaccttgtgcagtgcagacaggagattgtttcccagttgctgattccttcgtgacaacagaggaagtcagtggacttgtacacaatgttctggctcattttgactgcccaggacaccagtttctgctccctgtggctgggagagctggggggatggtggcatggtttgactatcaggttggaggctgctaaaggtggtggtgtgtgctgaggtgcaggggagtggcaggaggactgagctgtggactgaggaaggagaggaaggccttgagatggaaagtgtgagttaaactgcttaaaaagagttactgagagggatggggagaaggtctccagggagacacagctcccgaaaaaaactgaggtgtctgtctgtctgcctgtctgcctgtctgcctgtctgcctgtctgcctgtctgcctgcctgcctgcctgcctgcctgtctgtctgtctgtctgtctgtctgtctgtctgtctgtctgcctgtctgcctgtctgtctgtctgtctgcctgtctgtcatctgtgtagcttcatgaatgcctggagagtgaatcttgtgcagagttggcccataaagactggaagaggtgacttacatttcaaatgccgaggatctgacacaaactcacaaggtgtgcaaagaaacaggagaaggtggctcaataaaaataaggctccggaaactggccaaagacatcaagacaacacatgccctgggcaccaaaggagcacctagacaaagagagtcacggaaaggtcacagacaagagaagaagacagatgaaaagagagacatcattaagaggaacccaatagaaatcatggcgctgaaaaatacagtaaccaagttagacattttacagaaatggcttagtagcagactcaaaaaggcaaaaggaagaagccttgcatttgaagacaagccactggaagttagtgagtcagaggagcaaaaagaaagctacagaggagtgaacagaaactgacaaacttatagatggcttagaataaatctatgcaatgatgacgttcctgcaggaaaggggagacaagagggagaagctaaagagatgatggtctaaacatcctcaaacttgaggaaagacacaaatctacaaatacaaggggcacagcaaactccagatggaatcaatctaaggaaaggcacactgaaacgcaaactacagaatgtcaaagattaatttaaagcagtaagattaaaaaggcttatcaaatacagggctctctgagtaacaaaataaccaaatttcacagcacaaaacttgtacaggtcaaatgaatggaatatttacagagttagaagaaaaagctattgaatattttatacccaacaaattgttcttctataggacaaagggcaaattaggccctatgaatattttaaaaaaaagttcaagaagttcattaccactatcccaactgtgtgagaaaggttaaagtgaaagtttcaggttgaatgagaggatgtcagggcagcctgatttgaggctgcaatgtgtagcgttttctagccaaggtgaatatgtaaattaccgtaagtttcttttgtagaatttttgcttttcataggattcataaggcctgcatgctttaaaagattatacacccattgatgcataataggtgtctaatatatagcaaccattaatagcatgtcaaatgcaataatttgcgacacagttgaagacatgggtgttgagaacattggcgaacttacccatccccacaaaagacaagcattccatatttccactcatgttggctctgcagaactggtgagtgtataaaggtggaggggagggtgctagctgtcagccccaggacggagggaggggcacacttctgaaggagcaccgagctgctttgggaagctgagagagttctggagcctgggtgcactacaatgtgaacgcatcgcccatcaccgaggagactacattaaatgactgatattaagttttatgcacctgcatctcaccactattaaaaagcaactgttgtgggacgtgattagagctacatggagtgagtttgcattgcaatcttttaaaattggttctgagtaatcttgggcaaataactcctcgccctgagcccccttttctccaggattgaatggaaaagaagtattgtaggtcttggtgaagatcaaaggggccagtgcacctgagtcacttggggggtggtgaaggtggggggcattctagacgacatgcttcttgcaagcatgctttactctgccaagaatcccaactgtacagaaaattgtaaaaagtagtgtttttagtttattgttctgcaaatcttcttacaaacaaagacaggaacccttcctgagggaacaggtgaacaaaggatttgattttaaaaatttttgtgtcatatatatgtttgaaaacacaaccaaagtgacctctctaaactgagtctctaaaattgtgttgacaagggaggtgaggagtagaagcaggattggaaggactgtatgagcatacagcgttagactgtcccactgatggctttgtgatagcactgaatcactttcccagaatcctttccattaccccaacataaagtgctccatgcacaaggaccctgtcccgcacgtccccaaagaaagaagacatgagaccctcagacctgggggaggccctccatatatggagatactttgttcctttttaaaaaaatattattaataacactcccagattccaccatacaaaaatggagcccagggaactcctgcactggtttcagccaagagaacaacgatgagtagttgcttctctgtgcttgtttagactcccaaatccttgtttacatagatttatttgaaaaaaataaagccttaaaatagaagtccagtcttatcatgtgaaaaccccttcctatctgcatacaagcagcaggctgtctggtttattttttccttctcgtggagatagagtagttgctgggaggaagctgatgtcaaatatttgggcacacagctgagatctgagtgccagttctccaggtatgggggagggatagttatactagccaacccagtgagcacaggtttgcggcaattattttaaaaagaaaaagatggtattatcatcccatcagcaaaagacctctgatagactaaaggagcagttggggactgagagtcccttgtcgtcatcaaaactggcctcccagatatccatctgcccttagaagctacatggttatcttgttggacattcttcccaggcttgtgagtcctcatctaaattcctttttgtttaataaagacaactttaatgaatgaatgcagctggattaaggcagccattgaaggagacacttgccgactcccaaactctgttttaatgaacagttggaatcgccattgtgaagccctggagttcacttaggcgtttgtgctttcactatcagctgcagtgttatactttatccactacaaaataggaaagcatgtcagagtcaaaactaggaaaacagttagctatgggtcctccttcagaactcctgtttcctttcacctacatcccatccttcctcatcacctgaccctaccctaaccttaatcctaactctaccctaacgctaccctaaccctaaccctaaccctaccctaaccccaagcctaccctaaccctattctaactctaaccctaactaaccctaagcctaccctaaccctaactaacccaaaccctaaccctaccctaaccctaaccctatcctaaacctaaccctatcctaactctaacccaaaccctacctctgtcttaactctaaacccaaccctaaccctaaccctacgcaaacaccgaccccagccctaaccctagcaaactttctaaaggttttacttcaccacacttaggagttatttatatatgcactcttcagcctcatcttaattctttctcaaaaagatttctttttattttatgtatatgaatgttttgcctgattgcatgtattatattgtgtgcatgcattggtgtctgtgaaggcccaaaagaaagccagagaccctggaattttatttttggatggttgtgaccatcatgtgggtactgggtattgaactcaggtcctctgcaagagtaattagcactcttaaccgatgataagtctcaccagccatcttatctaaattcttaaggccccattgtcacataggaaggagaaagagcagagtaacttcctgcaaagccaagtgcccttctgtgatagtttaaatgtaattgctgcccacccccaccccccataatctcacagggagtggcactattaggaggtttggctttgttggagtggctttgttagagatgtgtgtcactgtgggggtaggctttgaggttttctatgctcaggatactgcccagtgagtcggggttgacttcctgttgccttcaagatgtaggactctcagcaccagcaccatgtctgcctgaacgccgccatgctccccaccacgatgataatggagtgaacttctgaactgtaagtgagccaccccagttaaatgttttcttttgtaagagttgcgatggtcatggtgtctcttcactgaaatagaaaacttaactaagacaccctccaaaggagactcactgagagtggagccacccagccaacagctgacggtgggggcactagccagctcttgaccacagagggaagctggagactgagtagggagcaattgccacaatcaaatttcatttcacccccagaagcagctcctgccctgttgggtgcaaagaatgtgactgaatggagttttgaacctgggcttgggctgaggtacaagtgagtttgtgtcatagttgtggctcctcccaaaaaggttatggggagatggcaatcatgaaaatcatctgactaactgccttgtgctcgtgggtcctggaggtgacagtagacagagacacataaaatgataaaagctcccaaccattcaagttagacacagcttctccccattctggccagagccactgttccgcagaaagcacctcccagggaagataaatcaagccagagacccaaggcttaggactttgaaaaacaacaacagtaaaaaaccaacaagctataaaccctgagtccacaagtgtccccaggagacctgccttctgcattccctctgtctgctgaggaccaaaagggatctctgggaagtcagtggctcttggggtcaggccgaggctcaaagaacagttccctgtgttgagcaaatccaagcgggatgtttagagcagggtgctaagagaaatggttttggagagtccgtcacaggctgagatgtagagggactccagggataactggtctatcagcatgaagcctgcacctggccatgttaggagttctcctccctaaagcagacttcaagaaactggcaggtggaaaccagaagctcgggggctgagaccatggaggtctcaagctcagcaggccacaccccctcctgctgttaattaaccatgagtatagattgctctgtttctttgatcagcaaatagccgagtgtcctttccagctccaaccctcatcacttattttctttctcattcctcatcttgactttcatccacccaaactcttctgttttccaatggcaggatccaaaagtaagctaagagctggtcacctgacatggtcgatgctggaggcttgaggaccatatcaaattgacaggattgcagctcctgatattggttagcatgagttttaaagtgatttccagctccacaaatcaatatgtgacttgtgacaatctcctcattttcaagatcaatgccatctcttctccatgctgtggaccctctgtctccatggactccattccagaagcaaccgatgtcacagagtgctgagcttcagtttccctctgtttgagggcagtgattggactcctattctctgaatggtttactgtgagcattttggctgactgttgtggaaggcaggaacggtccttcttatttgtgattctgtgtctccttgaaataaaccccctcacatcaagagactgtttagtcttttctctaactctgggttacatttcaaacaggcaccaggcttataccgataggaaggctttgaaagggctgtggttaatgattccaccagctgcctctcgtcctcttccttagtgacctctttttaggaataacggccacctaatacctccctctcaaatactaggtcaacagagagtcatttggctgatttttccatcaacaagctggggatttgggggttggcacacactggttgtatccatttcattctccggtctcccttggtagctgggcctttatatttctccaatgaataggagataactttggttgcagtataatgatagaagcatttcactcctgccctgcaaagaaatgccctgctgcctgacccatccgctcacatataaacatacaaactatggtgtgacagtgcggttgctagagataggctcggcatatttaaatatttgtgtttggcttccctcttcatccattactcttctgctctctcccaattatgacataaatgatttcagcaatatctaagcattcatctagcctcctgagaggattatttgctttgaggtccaagcttctattgttgaagtaaagagcttcccaggacccttgggagctgggcctggctgtagtgctcctgggaccatcagagcattagcttggtgagagcagtcaccagaaataacccttagccaggagctctcaccccataaacatgggtatgaattatctatatgctgttagagtgggattttggtttctctgtctacactccttgctgcatcttcagatgcacacaccagcagggaagaacccgttctagccatcttggaatcatggtggcaaatgagtcatgctaccttccacataagagaaacttgtgtgatgtttaaacagctaccctcacttgagatggcctcacctttcgccacagtcaagggagaaccaatcctgatgaacacggacataagggagctagctgtgcctcctcacctgaggggatggccccagtggctcaggctgaccagttcagctatcatgcaggcccacaactgggccatgtgtgggttggcccattctaacatctaccccacctatgacctgctggagctggtgaagggactggtcctgtggaacaatacctgaaggatctccatgacttagggtgacctcagactatcccatagcagttctgtgaggatccagtgatgatggtgtaccaggaaccagaggccttgaaccagaccagggacttattgcaatgagcatttgctagtaaagctgattggacaaaggctatactatgtgacacaccgctcccaatgccactaggactagtgaagagatattggagaggtgggagagaaggagaagtgaggagaattttttcggtgttcttgttcatttggttttggtttgctttgttgttgttttgtttatttgtttgccttgttttgttttggtttgattttttaattgtcctttggagagcactgaaggggtgaggggagggtgtgggggaaatgggaggtgattggaattagggcgtatgatgtgaaattcccaaagaatcaataaggaaatattatgtttaaaaaaccaactaccctcactctacactgtttgatggtcttgtatgtgctgtgtgttcttggtaaggcaccatctgtgaacacactattggagcaatcatctataacttaaagcatgagcttcaaggtaaaaaatttgtgtgttcccattttagcatttgtgttttctagctatgtggccagaagacctcttaatggagcccacttctccctcccatctgtaagaggtaggttactatacctactctgtggagtaaatgtgaagattcaaagagatcctgggagtaaaatgaaaacatggtgcctggtgttctgtccacagcattattaacaatgctgatattttatacttatgtaaaaagattacattatgtggggtagattgttccagctcatatgataatatgccttctttgtctgtctgagactggggacctaaataatgacagcattgaccaaatgcagagacaattttgttgtctcactttcagctatgtgggcatggttccacccaagtccttggacttctctgccacgagtttatctcctggtgtctcttgttcagaggcctaaaaacacagaggccctttggtttggggacctgaatatccctatcatcaaatatcagatttagtcctttcattactgacaagtagatgcctccagcttcctgaaaaatattgcccattaccaagaacagtttttctgttggagaaattctacacacacacacacacacacacacacacacacacacacacacacacacacacacacagagtccaaatggaaacattgcatggatatgtcagcatttaagcctcggtatagaatggtatgcaaccctgataaaaatagaatctacaacttatgacaagaacactcctctccttcacagagatagtctgtggaaactttgaacactgtgtggaaactttgaacctagtacggaataaggaaaaacaaataatgctctgatatgttctttctgaggagaaaggtcaaaaatgaaagtctgtttcctcttctagtgtgtgtgtgtgtgtgtgtgtgtgtgtgtgtgtgtgtgtgtgtgtacattcccacttgatatataaccctccttgctgcttcagggtggcttataaaacatatttacaattaacccatcctggtgttcttggccatgctctcactttgtgaaatccatatgctgtaactgatatgaggctccaactgcttggctacccatgtgaatttaatgcagtcaaattgagatgaaatcgttcaaacctgccagagtattttcatcagaggcggcatcatcacgttaattccatttcccagttggtggtgactctaggcctcttgttatggctaattgatagggctggctctagccaggcatgatgagtgcaggcgctagcttgaaaattggccctggtgaaccaagtcctgtccacatggtctcctcttggtggtcctatgtgatgtctcagtaccacacagatctttggctttttggtcccttcatattggtgcctgtatgtgaatgtgtctcaagagggcacagtgccagagcttctgccatggcctctagtcttgttagactgggttcttacccttcctgtcaaggtgtatggaatactcatgcttagttccttctagttcaatccaccaaagttgtatttcaatggaggtgttgttctgcttagattgccggttctcagctaatgagcatccttctatccttccttccctaccaaaatcagactttggtcttcataaattccatttccatatccagaagagcgagtcccctttataaacatattcaccttcccaattcttttctgccttgcacagcttttctcccctccccttgcctctccttttgtgacagggtttaactttcacagtcctagcagtcctggaactcacaaagtaggctgcattggattcaaactcacagagacccacctgcctctgccccctgagtgcttaaattaaagctgtgtgctgctacagcaagcccagaagccatttaaaactcttatttttttattttgttattaattctttgaaaatttcctctaatgcattttgatcatattctacaaccttccctcagccctttccagacctgccttcagtcaagtccagtctgtgctgcccatattttcacagttgtgtagccatccactgcagcacatgagccgtacttttagagaaaacttcctctcccagcagctattaatcaccagtggctcctcagctagggtcggtggtatgggattcatcttgtggggaaaggacttaaatccagtcacaaagcggatagtttgttattggtgccgctattaccccagtgaacgtatttttccataggtcattattctcgttcacaggtttcatagctgggggagacttattattgcttttcttcccctgcagtccatacaaagtcccaaccttctttcaatttgaaagctagccagtagggaggatgcttccaggtaagcaccagcttgagttctccacattctatgagtcaagtacgtggtgtcttcggcaatagggtcttcctatcaagctctggagactaacgaagagcattgacagtggcctgtaatgttttgggtctatgagacctcactggccaacagttcaaaacaagtaacatatcctgccgccaggcttgttatttgttagcctgcagtgtcgagtgggaggagtgccacacagttacagggtaacttcacttacactaaaaacccatgtgtatacatgtatttttagatagcttctatagtaatacacttgtatgggtttttcaaaaggccttcactgttagttttccctctcctgttcccacctctgctttgcctttcccaactccaccctatttaaatttaactattctgttccattgattcccccctgcactcctttataatctgtgttctatcttccttccctcaaaagcatcccccatggagttggtacacaaaatgaaacacacatatttgaagattccaagcttaacacacacaaatgagaggaatgtgatgtttctcttcctggaagtgaggtaacttacttagaataagtgtttacagctccattcatttacctgtgaatttcatttttttctaaacagctgaatgatatttcattatgcaaatgaacaacgtttttgctatccattcgtcaactgatagacatgtaggctatttccgtgttctgcctattgtggatagagtaccagtggacatggatgggcaggaatctctatagtaggacagagataactttgggtgtatggccaagagtggtaaggatgggtatggtagctctttctagcttcttgagcaacttgatttccatagtggctgtaccagtttgtacttccaccaacagtgactaagtgtctccccatccccacagccatgccagcattcattattatttctttgtttttgattttcaccattttgactagagtaacttgaaatctcaaagtagtggatttttgtttgtttgtttgtttgtttgtttgtttttaaataggaccctggtaatacaggcattaaaacaaaccattaaataaattggattttgtgaaattaaaatttattttctttctgtgtatatgcacatatgtgtagatgtacatcccaatatgcatgtatgtaggtacaagagacaatgacatcaggtgtcatttcttaggagctgtccatcttgtttattgagatcgggtctcctactgggactcaaggcttgtcatttttagtgtggttggccagaaaactccacagttctggtgtttgtttccgcagcacagggactgcgagagtaaggtactacaacatccatctggttttattggtaactaggaattgaacataggcacttgtacttacccagcaagcactttcccataaagatagctctccaacccctagagaggtgctttggataaaatactattgttataaagtttttattttcacatacagacgctctgagtaagattgactttaccaaattctacacagctactcactcagttgggagttgaacctgggacctttaccgtagagtatatgtggatttttctgtgccatgactgagtctggaatctgaggtctacactgctaggtttatactgtggctgttgatgtccaatatcagcttgattggaattaggctgggatagaggctggacaagaatggaggactgacactgtggggccaagcaggaattaaacactgaaggagatggagaaggttgaaggtccaaaaagaaatgtgataatcttcaaagcgaatagagctaaaggctgtatcaaagtagaagagtcaggtaataagaccatggaataaagtagaagcagtgtgtgagaacaaggagaccgtgggtcaggataggtgtcaagaagcacccatgaatgtctaaggaggccttggcaacagcagatccacctggatggatcctgtgctctgaagggagccctgaagtactcagaatggtggttgagacaaaatcagcgatctctgtgccctgagtattgacttgagagtctgcccagattaagcagtggaattgcacttggccttgtgtctcatggcaaactctatcctaactggaatcgaatgagttcgccagccagtttcagaggttgggaagggtaggatggtgtcctatggcccaattcatcaagatgagatgagtgtgagcaggactgggagaaggcaacccgcccatcacaagatcaatctgtggtcataagcagcaagctggtaatctcctcactgtgctggttgggaagtcaaaggaagcagcagctggtctaggtccttctgccccagcacgtcactcagctctgattccactaaccatgaggaagggttgcacagggtgttggtctgtgctcatcttttttttgtgtgtgtgtccaaaagatggatttcattataattagcattgcaggaggcccctgtacagaaccccagatatcagtagcaaggttctttttttattttttttattagttcaaattaggaacaagcttgtttcacatgtcaatcccttctccctctccctcccctcacccccaccccgacctaacccccctaccccatccaccctccactccccaggcagggtaaggccctcaacggggcctctgcaaagtccaccacatcatcctgggctgggcctgggcccttcggtctgtgttcatcttattggtggaattagctgatcaagaaacacatggtgttcattgcattcaagaagattcgctgaggagcagagctgttgtgatgatttcctgttcttggttcctgttgctgccagagacgtaatcagaattacctagcagtgtctagaggtttgcttttcttgaccgggaaaatggtgacaatagccatttcctcagtcaagagacaaatgacatcataaaggcaaccctggcataatgtaaggaatatgggatttgactggagttaaatctgtgccatttcttaactgtgcacccatgccacaatggcttaatccccctaagctttaattccctcaactcagcttgtcagggttgtcatgggcttgaaatgtaatgaagtctataaaagtggtttgcaaatttaacaaatgtttgagctccagtgggttttggccagaagcactgttgtggactgaggagaagttggcaaacaacatactgcctgctcttgaggaaccggaagttccctagaggacaaaggtgacaataaatggttgataatggttagagccccatcaagtaatgtttggcatagtgttgagcacagagttcagtagtgttacaaagagaacaaatgcctgagctgcaggcagacatgggtttaagatagacagatagcaatacttatgggcccttcagaggtgaagagcatgtgtgtattactgatattttgctctcatgattgaccaaagatcatttcagcacacagtgctatgtattatagagaatgtagtgatcttccttgtaaacttctatcagcattttaatgcatatagtgctatgtattatagagaatgtagtgatcttccttgcaaacttctaagagtttccttaaaatcaaagcacagtgctacaaacatagctgtctctgtttctccgaggcttcatcgagatgtcctgtaacacaatggaaagataaattggaggtactttcagatgagtttgagcatcctctgggagtcagtacacacaaagggcaggagccagagaactcaaagatatgaaggtgatactaagattgggttggagtgagatgggatggacagagcaaggaactgtcttagttactgttttgttgctatgaagaaacaccatgatcaaggcaatttacgaagaaagcacttagatgggagattacgtacagtttcagagggttagtccatgaacagcatggccggtagcacaataccaggcatgcaggcatggtgctggagcagtaactcagggctcacatctgatcagtaagttgcatgcagacagactgatcctgggctttggaaacctcaaaacccagctgcagtgacacccctcctctaacaagaccacacctccttatcctacccaaacagttccaataactggggaccacacattcaaatatggcctgttggggccattctcattcaacccaccacagaaacgaagaagatccctaagaagacaggaagctgaagaggaaagatgagccaggttcactggcccctgggacgattcagcactaacatgaggaggaaagagatctagcaaggaaatcccagaatgaccatgtgctgaggttggaggggaaccaaccaagggaaggaggctttgtttccaaacctcctgtaaatcctcgtgccgacctcaaactcttgatttcagatctatatacttacacaaaaaccacagatgagaaggggaagggattgagatgggcctctggggatttactggagtctccaatgtttctgagaatgacaaattgggattaaaacaccatctttggatgatttaagtgtaaatgagcagaaacatatgggttatatttccttcaaatttcatatgagtctaacaattaagcagaaaaaggtgctcggggcaataggcttataggggctttatgaaatatggaaacagtccttagactagagaattgccaagttaagtaagaggctctggaccaggacgccccatataccaaacctgtgtctctccctccttctctccccatctctctgggtctctctacccttattgtcctccgtgcctgcctttgtctatctccctttcctgttgttctttccccatccatccctggattcaggctgccatctgggtgctcaccgacatcttgagaacacattgcccagctgtctgaaagcagcagtgatcgtcctttctgtgtgtggaattctacccatgatttccaacttgagaggagagaaaaatcagtagcaggtgctgcagctccttggggatgtgttgtttattgtggctgtcctctgaagaatcattaggacgcatgctccggtaggataatatattgcttcatacaactttgcattataacccgtcctttatttatttctctggcttttctccctctgctttggtctccagcttatgctttgctagctacatctaggacaaagaaattaaaggctgttttccatttgctcttgagcctggctgaggaatgtcctcgtaacttagttagaacactgcctgatgacaggaattgcataatgatcattcaggcaagattgggctgtggacctggctgtttgccttgttgtaagggcttttagaagaagctacgaagttgccacaatcaacaggcatggggcttcaaagtggaagacccatccttagtctccatccaggctgctataaaggagctgaatgactctaagtgattggcttggtagctgcagaagctcatgttgagggcctggataaatcgacaccgtagatgggacctctgttctgtgttcttacataatggaccatacatagtagctctctggggtctttttgtaagagcaccaacccaattcacaagggaggccccatgactcccaaagtagcacctggggacaagaatagcatcactgtgcaatgaggtttaagcatgtgactttggagatgacacaccataagagattagtgtagactgagactgtgcagcctaggaagtctgacagagcaaaggtgcaaactcagatgcctttctgacccgccttgggttggtggggatagcctcagctctggggttgggggacagcagggcatgatgacacatgagtacctgggggggaaagaagaatgaaatcttaaaaatttgttttgcttttatttgtgtagtttaatgagttgtagcatgtgtgtgtgtttgcatatcatgtctgtgcatacatgttctcatgtgtgtaggtcccatgtttatgtgttgatgcccacagctggtgttaggtgtctttctcgatccctctatgctttatctactgaggcaagatttcttgatcaacccagagttcaccaattccagctggtcaagccagccagcttgctccaaggatcccttgtctctgtgtccctagcaatgggaccactggcaggctactgcagctgcccaggttttacgaaggttctgggcctctgaccttctgtcattgtgcctgtttggcaatcaattttcttcatctttccagtctgcattttagtagtttcatagtgattttacttaaacaataatcaaggcataaattaggcaagtccatcacatcaaaaagctaccctcagcatttcagaaagcaaaagacaagtttacattctgacctttgagtttccttatattgaacttaaacagtctacattattgttgactgaattcctgaagtcagtacaactgttttaaaattctccatactgtgacatatatattcatattttatttgtttcttactgcaaagtgtttcatggaatggaatatgcccactcgtcagctgataggcataatgactgttttcagtttgaagcagttatgaatgtaaattcctctacatctttaccaccttgccctattattttgtaatagctgtcttgatgggtatgaagtggtatctcattgtgattttgattcctactgggttcatgtatctttcatggagtctattatttgtttatgtctttggagaaaatgcatgataaatccttgtctatttaatttttttgttgttgagttataaggggccaactgacattggcacatgctgataaaccttttaaaaatctattatgcttaagtcaatatgttgtagctgaggtttgtgactgatgaatgggttgtagatcacttgccccgagacttctgtttaaatattcgacacttatggaaatgaaagtgagaaaataacacattaaagttgtcatttgttctctgtaatattgagaaataagtcaactcatacctatttcagaggactggtgggaaccacaatagaatcattgatgaatattcctcacttaataaattctatcctggatcccttaaaggcattttcattctctagcctcgtggattgtgctcttaaaatgtctatagtcccttattacccactgggaaaactaaaattcataaatgaaacgtagatgtaagaacacgctatatcttctgatgaagtcagagagaaacgtcaacttcttaggattacagagtggctttgtacttcatggacacaagacaagtgtaacatacaagttcaatgtcccatacccttttctggttccaggtgagaaaggaattcaattttggtggaaatccgagggtatacccattccttaagctgtggtacaactaaagtaaaaccatctgatgttcaagagaccttaaaatacaagcattcctgtatggatgttactgatgtggttgacacctacatgttgtgttagcgctccactttccttgtgtcactcacctccccaaaggatgcctgagtatactcgtctccaaaggtaaggttctgggtggtatctccctcccttgggagcatgctcctaaaacaaaatccccacatcatgctgttggtggagcctcaagtggaacttccttttgtgtctttctcacattttatcaaaattacatcactcattgcttatatgtgtatctactcttctgccagtatcatactacagttttaaaagcagtcttactttaaaaaaattttttattgaattttatttaatgggtgtttaaatgagcacacatagaggtcagaggacaacctgtaggagttagctctctccttccaccatgcagctcctgggggttgggggaaaactctggttatcaggtctggtcataagtacccttgcccacaaagccatccggcttgtctccatcctgatgtgggatgtccttctgcatgctgtgaatatgcattgtttttattggttgatgaataaagctcccaaccccttaccagtgcttccaggccttcctggtagtgtttgacaactcccctttgatgagggacaatgggagaggattaaagtcccctggtgcgtcctgtgttgctaggttggagttggaagttcctcagacacagattagacatgttcctccctagggagtgatggtttgcaagagaccctgatactgttgctcctccagggctgggctcactaagcagcttctgtattttaaggttctctctgggttgctccttggattctttccaaagtttatagttgtccttggtgatgggaaaagaaagggacattactgtgatcttatgtggatcctaagtctctacgtaatgttgtaggctgaattcttaaaagtaaccataggatttgcttaagttttcatcaggaggcagtgagttggctggaacacacttcttagggagccacagctctctctgtggaggagagtctgtatagttggtctacattagagcagaaaccctatacagtatgtgttcaacatctgttagataaatgaaacaatgtgtaaaaattaaaggacttgtcccgtaatttcttttggtctttcagagtgtctcagtagaggctgtatattttggtgttgggacccagcccctatcgggtctctaagagttgttttccagcataaccacaggtacctcctgttttcctgacctcaccccactagcttcaatatcctgttgtgaaccctttcacctggggtttttgtaagtttgtatataaggctgctccacaataaaggtgagagacattctctcagaaaaggaccaggcatcttgttgttcatccaaatctccaggctttcgcctgatactcagtggtggccaagagcagccacaagtgaaggttccaccgagattgggtaagaaatgggaccctgagagatcaccctcagaaggctggccagcaagtaaggagttgtgagggtggattgcaaaaggtactagaaaataggtacctcaactcctgagagagttggattggaaaaaggtactggaaaatagatacctcaactccaaagagagttgtattggaaatgcactggaaaaggggtgcctcaactcctaagagagctggattggaatagagctccaagcttttccccagtactcagacttagtggtggccaagagcagccacagtttggaaagaatttcacaaacattttttttttttctgatttacctagtggggtagttggcagtcattttaaagttgactagattgggaaatgcataggatctgtgagctttctatagagcattgacctgtgcaatagtagctgaggttgaaagagccatcctgaggatgggcagcagggtacaataggctgggggttcagactggggagaaattgagagagaggaaactagcacatatgtgcaagcggctttccttcctgagtgtgaccgactactgccttccacagatgtcagactccagctgctttagactttcagtgtgagctcaacaccacctactctccaaggcgcctttagttcatcaatactggattgccactgttgaggcatcttccttcttgggggtttctttgcatttccagaatgcaaatggccactattggactaccaagccccttctgtgtaagcccatccaatataccctacttacattatatgagcattctgcagtttctgtctccctagagaacccttgcaaatttgccaagtggtttttgctgacacatggtatggaagggtcccttataaaatctgtaattgacatagcaagaagaaaacaggaatctattattgccaaagtgagccagaaagttcctgaaaaatgaatgggatagggtaggttccagaacttttaggcacaggagattgagtcgtggtttggtagattggtcctgtttgagactaaaccaatctggaatgctaactacctatgacctcaggtaatgtgaaagaggacagactgattgaccttttccaggagagtgatctttcctgtaaaagcatcagatgctcataggagtatgaccatgaaccaccctatactaggctaatgttttcctctttgctgacctgaatggctgtccttctgaggtcctaagctctgggaaagtcactaagactcactgccggagctctgctactcctccagtaaacagcactctcatcccaccccccatcatagcctcctcctgcacttcctctattagacaagcaggccagcccagccctcttagagtggaccccattgttggtcaccttctgaagtgctggtccccagtatagctgtgccactcaaggcacccaccacccatcccacagacccagttttggctcctcccagtatcccctgctggaggcttagactttctacattccacccctgatgagctccagtgtgtggaattagaggggactggcacaggcctctgtctgcagacttcaaacaccaccagcagatgaagcctggtgttggttaagggccatttgcaattgcaactctttgtctcagctgtgtttttatgtttcacattagtcctgtgccctggagatggacggtacaggcagacactgtctgcagaacctcagtgggagacagatgcctgccgtcaccggtcccacgtggtctgtctgggatgtgctatgacttcaggtgaccccttagaagtcggacatcaggctgagccctcagcactttccactctaatctctttccaaccaaatgagtattggatgcatccacagcctctacctgagggacagatacataactcattgcgcatggctggggtttcctgcaaggacctcacctgtgacaagggccaacctagaatcttatctataagtaccaacttatttgcaagttgtgggtcaaatagccctgcatagctgggcggggggggggggggtgcgtttgaaggatgcttatagctccttcctccagagggtggctgggccaaggctgtgggctaaaccagagggatctgagaaagagaattgggaagtatgcacatgagaaagtgtgtgtgtgtgtgtgtgtgtgtgtgtgtgtgagagagagagagagagagagagagagagagagagagagacagagagacagagagagacagagacagagagagagtcaatggagtgtgagaatgtgtgcatgagtgtgtgtgtgtgtgcgtgtgtgagtgtgagtgtgtgtatgtgtgagtctgtgttgtgcatacccatgtatgcagttgtacttgcccatgcaggcatgtgtggaggtcaaagggtgacgtcaggatgttccccaattgcttctctgcaggacagggtactggtggcatcccctggacgcaggcaaatggctgaaagtcaaccctccaggcctttaaagcttcccattcctcccctgaaaggcacccttcctccccatttcatgccaccatagatcctttgcttttcagccaagtttctgaaatatctaaaaaaagtaatagtcgctttccccagaaaaacttataatcaatagtatttgttgcagtcaacccccaagtttcataacttgagatagtctttcttaagaatttatcccccaagccagagagtggtggcacatacctctaatcctagcacccaggaaacagaggcaggaggatctctgtgagtttgaggccagcatggtctacatagtgagttccaggtcaggcaggactgtttcacagagaaaccctgcctcaggggaaaaaaagaatttatcctctctttggaggcggagcttgaagtccaataacaaatttaaatctaacagtgcttccccagcaaaaaccaaatgggtctggagagataattattagtcgagtaactgctgtgtaagcaagaggatctaaatttggatacctagcgccacagaaagccaggcatgacagtgcatgtctgtaagtgcagtagagaaagatgagacctttgattccagaggctcatttcccagctggctcagctaaaatggaaagcttcaggttcagcgagaaaccctaccttaaaaagtaatgtgaagaccaacttcagaagacactcagctgatctctgttttccatacgtgtatacatgggtgagcttgcgcgcgcgcgcgcgcgcgcgcgccgcgcgcgcacacacacacacacacacacacacacacacacacacacacacacacacgtgcgcacacatgcacgctcatctattggagaatcaatcttataacaagtttgcccttgtaagagttcaggataggaatggtgcacatgcaacacactaaaggcacaaatagcacatatactttaaattctcctgggatttaattctctcaccttagcggtcaatagggcagtacatcatgttagcgatgtcatatgagttgatatgaagataaatttacattggcacccaagaccagccaactgatggcgatgccaaagcagacacctcccatcaccccggttctcttttgttccattctctgtgtgccaccatgaaaagatgagtacacgtgcatgctctgtggctcggtccatctctcgcttgctagggatgtagtttggactctgtagagaggatgcagcagagctcacggatgatgacaaccacttactctgcgtttttcacttgatatactttagaacgttaccagttttaaagcctagatttgcattttgcccgaggtctaagtaaattgtagaagtctttgaagcctctcgtgttgttacagaaacagctgagttctccacttgcctccataatgttccttcaccttttaatataaaatgcttcaaaatgggaaaataatagttgtgccgtatctttttttttttttaactcagcaagatctccatttcttggagggagaaataaatggttatacagaggaagaagaacagatatcccaaccctcagtggccatgttgaaagggcactttacatggccagtctcgggatcatactcccctcactccctcctcaatgctcacagctagagttagggtggactgtccattcttctccacagagctcagatctcagtccccatatgtggtctggaaagtgtcaacatatcacctgcccgtgggataaatgcagcatgaagagtagggactggagacttggatggaagcaaagaatccatggacggccgacccagagcttggctcccagtctgcttcactgattttacagccctgggggatttaggcaacgtgaacagacaccccacctaaacccaaggaacattctggcctccacagcaatttctgaggattagcctctaacttaggaaacactccttcattagacataatcattacagctggaaggagctcttgatttgaacactggtatgacactcattaaagattttcagctttcttcccttatttgaatctaggacaatctgttttgatttacgtttccaaatcagaggctgggagatagatttctcataagactctattaaccaatggaacattccctggctcgttgacatcgtaaacttttttttttcacttaacatgcacttatttgaaaaacaaatcttgaaatttggccattaggcccactgcctataaagctgcctgtttgcagagagcctctctggggtgccctgcaggtgcccagggcttgcagctgctgtagtttcacactgatgagtttagggaatggacttcagacctgagatgaccaataagatacactttacgacctaagcagaagcttacgctagaaactagagggtctttatagatggctttgtttcccccttgagaatcctaaaccaggaagacagcctgtggcagccatgtgtcgggtgtatcttgcatggcctggctccctggaaaaccagagcccagcacatttgcctaggcagggttgaaatgaggagggcaagagttacttggagagctgccctggagggcagactcctgcaaaagaaggtacagatggcttttccaagtaagactttgcagtcactgtgtagcctatattttccaactttttgttacttataccttgcttaggtattgaatctgacaaagggaacaaccaatgaagtcatatgggtcatggtacggttcaacgtagatgaggtaaagtccaagcaattccattgcagccctgatagtttgttaataggggtgggaagatttgataataaaatgtagggtgagaaccccaaaatatagctatcattcgagcagcctccattttctagttctggggcctccttgtgtgcaggcactccttctgtgcattctaatcatagttatgattaaaagaaacttaacaagcaactgaaaacatttttattttgagaagaagtaaatagcttgtctcccttatgttaaatattttaatgctccaaaataaccttgctggagaagaccaagagagaaaaaacaacctccttgagaattaaccccattcattcatcacccagccctgacaaacaaacccatacttagcgttctaatattatccttccagagttctttacagcactctatataccaacatccatcagcgtggaacatgtgggactggtgttgcctccacgcgctgtgcatctacagcgttgtctgcacagcagcctctgctgtgagggtcaaagaaagaagcacgcgcctttcagcagcacatctcccggagaccctatgcaaggtctttgaagatctgcatgctgactagcaggagcagtaaacagaagagtggaaacacggaggaggctctagatggctgaactgccagtgctgaataagcctggatcctgagcatacatttccccagaagaaggctttgaagtttgtttcaatctgtgaaattctcgtaacggtctaaatttgctcctcaacatctggtggagataattgcaacaattggtatggttcatccatttgtgcggttcttccctcaataattcgtgtgtgtgtgtgtgtgtgtgtgtgtgtgtgtgtgtgtgtgtgtgtgtatgcacgtgtgtgtaatacatatatgtgcgtgtacatagctgatgtgtgtgaatggtgacacacatgcttcagagcatgtgtgtgatggtcagaagacaatcttgagtgtccatccttatcttctgcctcatctgaaacagagtttctgattgttcggtcctgcacataccaggctcactgggccatgagcttctggggattctcctgtccctgcctccattccttgcctcaggcacgctggagttgccattctggctttacataagttctgtggttctgaactcagatcttcgcacttgcccagggagcactttcttcgctgagctatttctccagctacctccagccccaaagtaatctcatcaaaagtctttgacatacaacaaaatgatctcagcaattcaagcagtggagatctgagtctcacagcccttgaacttagggaccttattctttatttgggagggaagggtcaatggctacacaatggtaatggggtacagctgttaagctgtaagagattcagaaacaaaaagatgagatgcacagcaaaacattcttgtatcgcagctgaaggatgcgttgaggggctgtagctgaataggcaaggggcgtgggtgggaagataattccaggaagaggcacgacccagctgtaaggatggacatgagaaagacaaggcaggcatgggaacaataagccccatttgagctgcacactgtgcaggaagtgggaagtgatgcaaatgttggtctttgtattctaggaaacattgtgctgcagccggtgcacaatgtctcgtgttgcagctgtgtaagaacaggtggtaaactcttacatcagaaagaatttcccaaaccagggaaacttctactctgttgtttcatagtcactctcatgagtctacctaggtcactcagttagacctttgccacccttctctgtaccaatgacagcctgctctcccaattgaacgtggctgtgtcccttattgcctgaacctcatttgttcatgattctccactgaccatcacattgtcatcatgaggttgctatctggaagtaagtgcatatccgcttccctcatctctagcccaagccagggatgctcaggagagtgactctcccaacttacagagctaataagtgctacagaccagaaacatagatcagaagcttaaagtgaactcttttttattttttttatttttttttcgagacagggtttctctgtggctttggaggttgtcctggaactagctcttgtagaccaggctggcctcgaactcacagagatccacctgcctctgcctccggagtgctgggattaaaggcatgcaccaccaacgcctggttttacagtgaactcttggatgacaccggaagttaacatctctagagttcccatcatctgtgttctgtttcacagtgttgttcttttactcactcactgatttagcatgggaatactgagaactgaatatgtcccagaactaacagacttaatttttactctcacaggcattacaggccacttggaaagatattcaagagaacgattccgtgagcaaaagagcactgacagtcatccataaacactggaggtccggtggccacaagggcaagctccataggccgccttcccctacttccctcttacccagatgtccgcttactgacatttctaattccctcttatagaagtaaattctcttactcttttttgatatattaccaatttgtatgaaacgtaagtgcttataaggtaaaggaagaagcaataagtatgcttatctggatatttcaggctggtacaactggagatttaaagacaccagcttcaggattcaggtttgtttaagtgagttgaggaaaacaggatgaagtcccacctttggtacattagcaggacctgggttaacttttagggcagcatacagagacttcactgtgtccagagtgtgtcctctgactcctgagcctcacaataaaaggctaaatagagttttaaaataaatatttgtttttaaaaagggaaggataaggcctgacattaagatatatgtgaggctgtgtgaaggttgtcagtaactaatcagctaacgatggaatgagtaaaatgtgtcccaggaagactctcaagacaatcagggatgcagaaatggatttgatagatgaaagacacttcatccactacaactctgcaggacaaaaaccacatgcattttcgtgacctagaataatttacaaaatcatcttccaaaaaaattaacaaagttgacaaagacccttggagacaaaaaaatatggggacctggtagaatgccacgggaaacacccagttttagtctggtgcactcagaagtcatccaaaacttcctcacattttatactcttctccatatggagatgggcatttctctgtccagtgattcatacacagtgctgtggggagacatcagccttgctcctaggatgaacaaaagacagtaaactgtgcagatttatgaaaacaaacaaagtgtatggtgatctagtgggactcagaataagcatagtccgtgctcacgtgttgtttttgttttgtttttgtttttaagcacaagaagctatccatatacagaaggagcaaatgacttctagaaagagcaaagagtacttgaaatgccattatgctgggccacaaaagtggagaacaagagctagaagatatggtccagggaaagaagacaaaacagacagcagcgagccagagccaccgcatcttacgttccttgttaggcactatggcgggagtctggggagagatcattcattgtccatccgtagtgagagcaattggtccccatgtggtgagcgggaagagaatcaaggaaacttaatttgtgaaggggaataattgactgtgggcacatgtgacaagcagattgtgagtctgacatataataagcaaaatatggaatatattattatataattacaatttcattatacaacaaaaccatcaaaaagctgccatgggtcataagtaggaaaattgtgtgtgggtgataataaacacctgcaccctgtagcattctgcactttccatggactctgccatttaaatgcctaggtgtgtgtgttgtaatgtctgagttaacgcaggcagactgaagctctgtgttgaataggcagcagaggcagcccccttagctgggttcctctggctttaatcaagcacattcggtcttgcagtgatcctgctgcatcgtcctggctagatctcaggtaggatcctgtgtgcaaccagaggtcaagccaagcacagagaagcaagacccagcaacagggtctagaatgatcatccctatggtctttagagatcagaaagctgagtaaactctctcaagtgtccttagggataaaacactgagtactaaagaccagaagcctcttctgatgggcaagatgagaggagaagtaatgacgagcctcttgggggcctgactgggtgcaagggattggtgtgcaggaggctacactggcttatttattctccacaaaactggggttagagagagagatgggagggagtgaaagaaagatcctgtgtgtgtgcagaatgccatctttaactgccaatgccagccttcggttttcatccatcctgaccagtgacatctgcacacggaggcattatcatttctttgccctagatgaaaatttgatgcaatttaaaatgttaagatctagaaaaagaaggacatcaaacatccccagctgttcgaattgctctgatttcttttccaccctcttagttacctgggtttgttctgaccaatctggtttttccacccctctgtcaacactggttttatctcaggtgtcccctgaagttgggttcctaccatgtgggtactaggtgtcccctctagacagggtcactaaaacactattcctccagctcattgtactgagtgttctggagaaactctcctcccttagtgacatgctgttaaaggaaacagctccattgtgggaaatatttgcatctggaagactttattgaatctcagagccattagcaagggcactgagaacttaattgcacactaaagttccaaaatgactaaaaaggctgaacacagaatgtttctaccttaagcatctggggctaggatgacattgtggcatttttcctctggcagtttctgaatatttgatttgtctttgtttccactcattggttttttgtttgtttgtttttttgtttttgtaaatactgaggtttaaatttacagtctgcctgagaaattggagatattttaaagttagcattttaattacgaagttgattttcatattctcattgggctgaaatttaaaatattagtctgcccagttcaagtcaaggagtatggctaccctaatgatggtaactgtctgccgtagtgacaataattggctggtagtcgcaaaccaaaaaaaatctctttcctaactctcatctgggacaaaagttctgccaggatggacctatggtgagggaaacataccccttccctgcagtatgagttggacccactcccctcccccatgtgagttggttatttctagaggcagtgagtgggcgaaaagaccttggattcttctcctggtggtgatgctaaggttggctgctttttgctttttctccagtactctcagtttccctagtgactgatggagtttctggcatttttccatgtgaagtttctgagggcttgtcatggatcagagcagtggtaactattttatttcattttttcctaaactatttatgaggagagtgaatggttttaatttgactcatccaaaccttattatttcccagtagatgattttttccccattgccttgtttggctaaattcctaatttgcctttggctaattcaaagaacaagcgaaagggatgtttttaggtacccttaatctcaaagttgataataaattttgtggttattaaataaacttgtcttgctgccaagggtaaaataaataaagatgtttgcttcagcaaagacagttgtgtgtccctagactcttctacatcttgcctggatctgcagggcattagcacattaaagaaaatctgcaacactgcaagcctccatgtgggcccttcacatactactgcttcctcactggtcctctgggcaactcaaagaagggttatggatgggaaatagatggagatgacttgatgctcccagtccagccatcctgaggcactaacaactatttggagagcaaaagccaaataagtcctaggactttcttctactaattatattggctatttgttatatagttttgctttctacctagattttggaagggcatatttatttctacaaattccatgagtccaggccctttatccctggagatcctctttaaagattaattctacccatcatcccagtctctttcctgcaaggcaatttccttattttttacctccaatatttcttctctagatcagatctttttaaattttcctacctaagaccccttttgcctgataaatttttatgataatttgtaaaacaagatatgcatgtcaaatattaaggaatatccataaacttttcaaatagatagtgcaaacaattttatcatttgttaaggattaaaacaaatttgcatactaataaatgaatattcttgtttaattttgcataaagaattaaatctgggctaagtatttgatactacatgacctagaagatcttcaaggattttaagagttgatcagtactttgatcccttaattgtcagagttgagaatgccacttgacataaatatctgctacaaatagtatttcagaaattgttgggaactctgtctcaagccaaaattcactgccactttttatgaaatttatgaatttatgaatttatgaaattcaagtcagtaacacacacagcagttctgaagatcaaaccattcaaacacagggcaacccaaagatctgctaattcagtgctgtgtgctgagtaaagagggtaaggaatattggaagacttggttttccataattaaacccctgtcttttggtaagaatgcagttcctaatttattatagtcttggatctgagctgctgtgttccaaataaggttcgggcagtattgtgtggtgggtgtatatagtgttgtgtttagaatcaaggctagggtgaagtcttgggatacaacaccacccagtaattccagaaacatctcaattgatccaattgattttggactaatttttatttgttgtacattcagaaactgttcattgttgtcttatttttcaggatccccttattcaggtaagctgttctgtattggggttatgacccacagtgtcaggagctatgctctagatgaagtccatatgagaagtgtgtgagactgggcttagaaaattgcacaggggacatctttcttcctagcgcttcagtttcctttttaaatacccaatactggtgatagcagtcttgctggccacactggtgttagtctggtgggattcatactcttcccagaaagcatcagaagtccacttgcattcatatcctattattctcactcagggaatttttccataaggaaataatctgacacacaagaaaatacattggatatactcatcaagatgccaacttcattattgcttgcattactacaaaatttgatgtaatcaacagtccggaagcgggagaatcatctttctgtattggtgtaatagcatgctggaatgtcttgcagcctttaatgtgctgccacacggtgggggggagtttagaaggttacaccatagttaacaaaattggcagtttcaactcaacacatactaaaatctgtctagaaaagaaatggtagcaatacaaagaaagaagaatagagaagctttgggatgactgacaatgagcaaaggttttgcctatactatttgacagtttctaaagctagtataatagcatatacaacttctcaaacaggaaaagaaaaagaggagacactggctcttcaccattcttctagaaaaggaatagttacttgtgagccttctgggaaggtgaggaatacaagatagaggaaatggttctcttccttccttcctttctttttttcttccttccttccttccttccttccttcctttcttccctttctttcctctctctctctccttccctaatttttgaactgaggtcttaatataaaattccaggctggcctcgactttgcgtcccctgccagcccctctcaagtgctggaaggacagtatatgccaccacccctggctgatgtggtcctcttcctggtgctcttggactttccttgaaaaccagtctctcctcttggacccaaagtgtttgcatgtgactaaggaaaatcttctaagtgcctgaaacttgctcagtttgaatgaatcccctatgatgaaatttacaaaagagaaagggcctccgacctcatgcctctcaaagttcctttaggagtcccttcagcaaggatgacaccactggacaggaaaaatctggatgttcctgctctctgctgcatttcactgatatctccattccaatggctctctttgcatcagtagaggaagcaggatccagactcagtatgcctatttttatatcctggtcttggcccttagtggatgtaagatctcagggactttctgaacctctctaagctttagttccatgacctgcaatgagaggataacaattacccgtatttcctaggattccatgtgatagtccctacaaagtatttcggacaatttatacaaaacagatgtaagctattattattagctgtttttttgtggcagttgtttttatatgttatctgaattgatagtatttatcatgagcttattcatagtgtctctctcagttatgcatgatcttagaaggcagaacccatgtctactgcaataatgaaaacagagccctggtgtagagagatggttcagaaaataagtgttggatgacagagttatcgtatgggctaagatcaattgccttctcttattgcgtgcgctcaaagatgatccataggccgtattgctaagatctctttattcagataaacaccagcccaaacgcaagccagagggtgcccagaggctgcaagctagcgtggccagagagaaggagcatccacatgtttgtggcctcttaagaattctctctgtgtcatcttcgaccttccctgaccacacccttacgggcatggccaggcacacctgtaggggctactaggaggcggggctacagtgtctccctaaattctctagctataaggatatggttgaaactagaccatctgatactgatcccattgagaagacgctaatcgtaggtgtggtggtttaaataaaatgttcccataggaccatagggagtgtcactattaggaggtgtggccttgttggaggaagtgtgtcactggggttaaactttgagataccagatgttcaagtcacacccagtggggtattctttttctgctgccagctgatccagatgtagaactctcagaaacttctccagcaccatatctacctacaagccactacgcttcctgccatgatgataatgtactaaccctctgaacttaaagtgagccccaattaaaaactttcttttataagagttactataatcatgaggtctcttcacagcaatagaaaccatgactgagacagtaagaccatctcttcatcaaagagatctaccacatgaggggagtgccacggtgagagtgtaagagctgatggaaggaaggggttaggatcaccaaagaagtaggcttggaacggaagccattgctcctgtgagcagacaggaaattaaaagtccaaggacacaagacaggagtatggctcttacatgaaggatgggaatgtgtacaagcttggcatgctaacaggttgcatgcctaaggagcaggctgataagcagaccctaagccaggtcacaaatgaatgaaacatcccagtgttagagactgagttcttgccaggaagcaagactaggatactggatattgaacttcattgaggaaaaacaagattagaaagaccaaagagatgaagccatcacagaaaaatgattccaaggccctcttcaaacacttcttccactttaaactgtctttgaccattccagctggccattcatgtgacatttggctggtactgccttgtattttgagtagtttgtgctgtgtttacttggattattagactataaatagagctttccctcaataagatgatatagcacaattttatgagaccaacacccatgatgattagctttaactgccaacttgacaaatctagagtcacctaggaaaagtctcaaagaagtattgtccatgttgggttagcctatgggcatgattgtgaggggttatcttagtaaagttaattgatatgagaagatggccctagcttaccattccctaggcagggagttctgcactgtgttagaactcagcaaaagtaagcaagcaagcaagcaagcaagcatgtatgattcatttccctctggttttgctggtggatgtgatgtgactagccgtttgaagttcctgccttgacagccccacagtggtggactttagtgatttggaattataaaatgacaaaaaggcacctttatcctgtaggttgctttttgtcagagtatgttattacagcatgaaattatatgttggacaatttaaacctgatgcccctgtctttgacatcttctgacttttcacaagtagttcacaagtctacttttctccttttcactctgccacacactgttgtcattcgtgctccgaatttctaagccatgcttattttaatctcgagttcttttgtgtgtttatgcagatggatattagcccaaattatagattctcagccattaggtattcattagtttatttctatgatggtcctgataacagcaacacaaagccacaatttgcaatattctgataaatatttagttatggccccttttctttctccataaaatatatggtcataactaattatcaaaataaaaaaaatatctgggcacggtggtgcatgcctgtgaccccaacaagtttaaagccaacctgggccacacagtgagagattgtctcaaaaactgtttttgaattaactttatttaaaacttccgtttgccagggagtatttctaagagacttttgggaagcagagagcagtaggtacatttgtcgcaatagtccaaggtcagacagggtttggtaataggataatagagctgatagcattcattcaccactgaaggtgaccagtctctggaacaggatggacatatcttccctttggagtatgattgtttcctgatgtgccttgttttcatcaagctagacggactagaggttgcattatgacttcattacctgtgacttgcatggaatgaggggaactttttgttctggtacagtgttaacttcccagctcttggcagcatctagagccaactgcaagcctgtaacattgtgtgccaggcactgctgtgctaatgatgtcttttgagcaaaatttgtgttagatgaattttgactgtgatcaaaaataacactcacctttagacaaaaaattggaatcatcaaatcaaggaattttcaactgaagtcaatcatgagctaagtgatagatccttggcaagtaacatcagctaggcaccttaatacagagacaatgttggctctctgcctctctctctatttctccccttctcctgtctttcaaaggagtaaacacagaagttcaagtgaggctttgcctggtgaactattacttccttgctcaaactgtgagattgaaggaaccggcttcccttttggcagccataatggtcgaacatgtgcttctatgaccttgacctagacactagaaagtcagatgcctgtctcgtgacaaggaaccaatcagaagttagctggtggcgctatgctttatggctctgggtgtgctttacggacaagcgcacagcaatgacgtagagagcatagcaaccaccctgggagggcctatgagccataacaaccagttgaccaatcaacacagggcaagccctccaagcctggaagcacaccaatcgtaagcctgtgcgtacccctagacactccccttacgctgccctataagatcttttgggagacccaaggagccgtcttttctagccgtccgccatggcgggtgggtaaaagacccgagctaacatgggattagttcattaaattacaataaagcctcgtgcagtttgcagcaagctctcgaatccgcctggtgattggggtgaccgcgaacctggcctgagaccccggatacttgaggtttccgggggtctaacaagataacccactgcagttgtgaagatgcgttactcaattatgacaccagggacaccttagctttgggtagtgcattaaaatccacaggactctgtttcctcacttgagcctaacacagattccacctggtgcccagagccagcgatctcctcaccaagttcaagcttagcacagtgcttagctagtcctttggaagctctgtgtagaattaaagtcgatgggtcacttttcagatgaggaaagaatattaattgtttaaactcagacacacagctaaactattgggacttaaagccatgtcctagtctttatttccattggccttgttgttgacaccggtgaaaatttcccccaaataattatggattccaaggatcccaggtgctgctgagattcaggggtttggatggcttgtggtgaccttaaaggtgattagtcactgcagttagaaaagagagggagctgtatgcagcagtaagaaaaagaggattaaggctttgggtgtgccttagaatggtcttttaaataaatacaataaaaccttatcctgtaatcggtaaacagtaatataattagaatttttttcctatttacttcctttaacatgcaatggggggaaatggaaaacaaaagtcaaggattcaatcaaacagatgtttctccagttattattttctccttgctgttgtttacaaagagagattcctttaacaaaatgtgactcacagattccagtgaggcagctcttctccatgggaaggaaagagaaaaataagggaagaaaactcagatcatatgcttttattatgcacattattacgcctcattaattaacccaaccactgtcccagtgacgttctgggctcacttcacaggaaaaaattagtctggattgccaagttcaaagacaattacaggaagatcaaattatgcctacattgcattctgtcagggcacagagccaaattcctgtcacattcgtaagactggagtatcctcactaaaaacagcccaaagaaccaacgtcacaagacatttgacgtccacacagaggatgtgttgaacttatccaagtttcctttctcagaatcacataatggaccctgagaacgggctctccgtcagtccctgccacatggcagctgggcaaagcctttgttctgtctggtaaagcatagcaggagctggatgtggtgatacatgcctgcagtcctgcagctgtagagactgaggcaggaggattgggaggtcaaggctaccccaggctacaaagtgagtttgagggcaggtgactgcttaaggaaatctgtaaccaaaaaataaaacaaagcgtcaccataatacatcagggaaagacaaccccacccccaatcaaccctcagtaaaagagagtgaactatgccttatttctaataaggactggggatcttagtatctttgggcctggaaatcatgagaaggcaaatcgtaaggaagacatctccctggttcttgttctaggacactgctcctgtgtagttgaaggtgcacaatgtgtgaagtccaggttgctacccctttgaggctgaaagaacccactttctgggaaagtagacaccacttgctatcccttcttgtggctatgaagcaaatgtgattttctgagaattctgaaccaaggtctagaaacagctagaagctttccaactctttttcttagaaagccagtgggcacatgcactaagcttcatgggtatcaccatatagtgaggaaacacaagctatctgaagagcagcctcatggagacctgagaagcagatgattctgaggacttgggttcagccaggttctcctgacaaattggtccagccaactggtcaacccatcatgatgcctaggcactggagagcacagaggacttgccaccacctggtgatgccccagcacagataacagtatcactctgcaaatggatgcttttcccataatccccttagtgcctgtgctggatatgtattcatttacacaatgttatattttatatacacagttcccttcaagtatgtcatgtgcgttgaccatgtttaccaaccgccattctctgtttttagtagcttcatccttcccctcctgttagtgtcctcccattgactttcatgccacaaagggctttatgtatctataaagaattatggaacctacaactgagagaaaatgcatgtttgtttttctgcatctgacttactttgattaaaacgatctgcaagtgcatccatttccttgcaaaaggtatgggtttattctagttcagtgctgggaaacactctatgatgtgtatatacaccggattgtctacaaacattcctctcttcattgacacctagactgactccatatcttgcttattgaggatagcattccatagatgtccaggcatccctgtggtgcatagacccggggtcttgaatatacaccccagaatggtatatcttggtcagatggtatatctattttcagtgtcttgaagaaccttcacacttatttccatagtggccagagcagttacgttctcaccagtggaatacaagtttctcccttcccaacgtcttcaccagcatttgttgttgttggttttcttaatgaaagccattctgattgagacaatgtggcatcttgatgtggttttagtttgcatatccctgatctagggtcctaaagccgaccaagcaaccgaacgtgtgtttatccttgctctctgctcctgaccgtggatgtgatatggaagtgtgctgcttcatgtttccacagctgtgactcacaccagtgtggactagaacctgcactgaacgctaaaacaacccctttctccctaaagtgtttttgtagggatgttttatcatagcaatgagaataaaactaagaaggatggttattgtcaaaagcagaactaaagctaaataaacagaaagtaacaaccattatcaaagaggagaactcagaacctccgggctcctctgggattgtaaaattatgtagccaccgtgaaaagaccccagaagttcctcaggaaactatgcaggtagttttgtgtggtgctttacgaatagaagacattgtggattccaatatggtctttaaagatgtgtgtggacaaaggaagaacaatgatcagggtagagtagaacgcattttaaacctgtgtggggtgacaggattggagtctgaaatcagagggccttactcttacccaacacttggtatgatttccagaacttggtctcctcattagttcattagtaaaatatgattaacagtcatgctgccctagcaaagctttggccctataaaccaaagctattctctcttcccattgcccaatatcacagcagtgtggtatatggagctttgtggagtttgctcgggtcctaggtgctgtgaggcagagtggctccactgtagaggcaggtgacatgatagctgtggctggctaatattgtaggtctgtgtgtagtgtgtgtatgtggggggagggctccacactgacttccatagtatccgaactaattttcattcctctcatcagtgtgttcctttgtgtcctctctctctctctctctctctctctctctctctctctctctctctgcttctctctgtctctctgcacctctctctgtctctcatcttttgagacagggactcactatgtagccctgagtgtcctggaactctgtcttccaagtactggtataaaggcgtataccactgtaccttgcatgttgtatgttttcttaatgtttactattctgattggtgagatgggatcccattatagatttataataattttatttgttatcagtgatgtgcatatggtggattcagaggacaacgtctctgtccttttcctgtggactccaaggatcacactcaggttgttggacttacacgtctcacagacccttgatctagttttaattttaatttctctgatggaatttttatatgtgtagtgagcatttgtacttaatcttttgagaactgtttattttatttgcccatttattgactgtattgtttcggttcttggtatttggttgcgttttgagtacttacactttatatattcgtcctctaccagacatacagctagcgaaaatctttctcctgttccctctgccgtctattcctttgggtaattgttgctttttctgggcagaggcattttgattttatgtgatcccatctgtcaattcctgcatttatttcctgagatagagaagtaatgaaggattattgaatgtaaccaccgtgcccaaggttctcattttatcattgctatcatgtcaaggagattgaagagcaggaaggacttttgtatgttgggttatatcaattctcactcttcactagcagttccagaaaatgcattgtttttccaaattcacctctccatcagcttcctcatacaagcaaggaaagtggtgtctccatggagccaataatcagtaagagtgcttgtcttcctgattcctgctgctgtacttcccctcctccgtggagtggtccatgctaacattttcatctgcccctgcaagtgatggccagaataattcactaagagaacagatttcaacaattgtcaccatagcactaaatttacttttggtctctggtttggggacagcaaaggatgttttactgatctctgctctcatctttaatacttcttttcgtctgttggcctcgggtttagttagattgtttaaagtggaaaccaaggtccttaactagagacactacctttctagtaagcatgatgtaagctctgaatccctctctaaatcccactgtaagggtgggcactggaccaagtttgatgtggtatattttcattttatttggtctaagtatttccatctctcctcttggtttcttattttcttgtagaattatgttgactgctatctaatttctaagtactttggaggttttccataagtgtgtaaactggtaacatacaaactttaattaaaacatttaaatttaggaaaattattggcatagtgtggtcaaaacctaccatcttggtctttattttctatttttcatagaatctttatgattttctgtattctgagctctttggggtttattgagtatgttctatgaatcccattgtatctcttttcacagttcattctaattgttctaagtgcctgcctttttattaacttttatttaaattaaaaacaaacatattttacaaacaaatcccaggccatctccctcctgtcctcccatccccccactaacctcccaacccaccccatcccccccattccatgggggaatcatcaaagtctgtcacatcatttggggcaggacctaggccttcctccatgtatctaggctgagagagtatccctctatagggaatgggcttcaaaaggcccattcatgcactaggaataaatactagtaccactgtcagagaccccatagactgcccaattcccacaactgacacccacattcagggggcctggtttggtcttatgcaggttccccagctgtcagtctggagtcggtgagctcccacttgctcaggtcagctgtttctgtgggtctccccagcatcttcttgacccctttgctcatcactcctccttctctacaaatggattccaggagtttggctcggtgtttagctgtggatctctgcttctgtttccctcagctactggatgaaggctctaagatggcatttaaggtagtcatcaatctcattacagaggaagggcttttaaggtagcctctccactatttagattcttagttggggtcatccttggagatttccctcctgccagattcctctttaagcccacaatgattccctctattaaaatatctctttctttgctctccttctctgctgttctcccaactagaccctcctgatccctcatattttcctcctctttccccttctccccccatgctcccaatttactcatgagatcttgtccctttctccttttggggggtccatgtatgtctctcttagggtcttccttgtttcctagcttttctggggttgtggattgtaagctggttgtcctttgccctgtgtctaacatccacttatgagtgagtacatattatggttttctttttgtgtctgggttacctctaagtgcctgtcttttgacttaatatatacatttttttatgtctttcattgtattgtctctaaattatcagtcatctttaaaattgtattttaaattgcatataagaaaacaataattgctgatttccattgttcttccttctgttgtattcatatacattcccataccacctaatttttcttattctgaagggatattcattatcatttctcatactcccatattaatgatggaatatttcagattttatgtgtctgaaagtatctgtatttggtttggggttttaactgataagatttttctagctacagaattcaagtttgctaagaatttgctccaacatttttttaaaaaaatattagttttcccttttagttttatgaatatatgtgggcttgtgtgtttatatgtgtaccacatgcttgtctgtacctgtgaggtcagaaaaaaaaaaaaaaaaaaaactggctcccttggaactagagttacagggtgctgtgatctgtcccgcttgggtgctgggaattgaagatggaggtttctgtcctgctgaaggtccctctgcccttcagccccaaataagcacacagagatatattaattattaaattgttggccaatggcttggacttcttattggctaactctgtcttaattattaacccatttctattaatctaagtatttccatgaggctgtggcttacccgtaagctggcatgttactcctttagcagcatggcgtctctccctggcagttctctctcctcctctccccagaattctccttggttcatagcctcacctatactccccgcctggctagaggccaatcagtgttttattcatcaaccaataagagaaacatatatacagaaggacatccccataagggaaccaatcctgggtcccctgaaagagcagcaagctgacaacccctgagccatcgctgtagtcccttcaacattgctttacgacttcttcttgccaatgcttctggtaacacatcttttgttgttgttgttgttttgttttttatctagggtctcactgggcttctccctagcactcatcctggaaatgccagttgccttctctgaactcacagtttttctctcagcaactctgcatgaccattgggcactgccctagtttttgcttccttgatacacggctgggaaatttccatctaggctgtaagcagtgattaatcatggggcctacctcttttaagtgccatttctcagaaatcactgctcttttctgtctggcgtacagtccctgaaggctgttattactctatttccccatacacgtcatgccatgtatgtgtatatgtgtgtgtgtatttgaccatagaaactgaaaagctagatccaatgcttgctaatgtaggtggtcaggagcagaaatccacaaaaattcatgcgagtaacaattcagtaattgtttctcacccagatatggatttaagtcaaacatgctctaaaacacatgacttatttttgctttcttctcttcttcttccagaatcacagtttgtttttccctggcttgtatcggaaaccttgtgccattaatcctactcatttgatctggggagtgatgtctgtggagcatcccagttgccctttgagtcagtggttggtagcacctactgaactcactagttcagtaaatgtagcagtttaatggcagttttctgtgcacagtgtatttagcatcttccatgctctgctaaccggtggtgactggcagagacatccaaaagcctgcaagctgagctgactcagccaaagtagagtccagccctctgtggaatgtggtatgggctaggatttctttctcaacagacttgtgtcctgctgggtggctgctggattaaggaaaggtattttacaatgtggctgctaatgtctttagtgaaaggggtgcttcaatttcacagcagtataaatggcattatgagcctgtcacacgctcggaggaagatacagtgtgagagagatgatgaagatggttcctggagagagggtatgtcaagaacagctgttaggcatgtacacacacacacacacccccacacacttgttcgcacttcctccctcacctctgtaacatgcaagcattctacaccagactcgggttgtgactctgtgagctgctagctgattgaaatcctttgccctgtggtctgagctcatgccctcatgtggacagaccacagaccacataactgtccacaccccctcccaccccattgtcattccctaacccttttctcccccagtgtgtaaataacactactcttgaaactcttgaattacttattcccagtttccttagagtttgaaatgcataaaagcaccagaaaactaacaggtatggagtcacattaaaagtgactttccgtagccacaggaaaaccttaacggaatatgagtgccattaaagactaaaccaatgatcagcttatgtttcaagtttgaaagagtcaaaggatagggaagaaaatatagttaagaagcacaatttttttttctctttgaaagtaaaattggtttcatttgaatacagttaattttattttatttaaggcaagactttctatttaatattttaatttttattatttattttactttttgctattataattgccttgtatcctccctccaactcctcccatagtcctttccttgctctttcaaatttatgcccccttttttcattaacatatatatatatatatatatatgttatatgttcctaaactcataaatacgacttgctcagcctacatagtattacttgcatgtatatgttattaaggtactcttaagttccaaagtatctcctatgttgagcagccaagacacagataacttgaaaattgtcctaatgtgttttttttttttttttgaatacattgagaatgggaacatctggctcagattctctggcctccatcattttggttaatattccgagcttataccttcgtggtatttccatatagcaacctaaatagtgagaggagagaaagagaaagggaattcacattcaggcaaaatgcagagctctgggatgtgctggctcgggaactttccttagcattcccaaacagcccaggcatctgctacactctggtgttgaagcagctgtgtgtcctcctctgtttgctcttagatttacattgctggatgacttcatcctcttaggcagacttcatttctccttggaaggaaatgggagccaatcagtcagaatgttgaggggataaacaaggttcatgcatgatttgagagcaaattctagagtcaaatcaaaccctgccccacccctttcttgttgcttgacagtggatattgagtgagcaggaacatttttttacgtgaatggaactggcgacagattacacaagcagatatggagggtttcccactccctgtagtcacagcccttcgaatctgctcttgaatctcttccactctgacctggccccattgtcacatttgctttggtcaatgacaagtcagcaaatgcaattcaaacagccacttactgcatagtttcccatagggccagttgtctcttgccagacttgggatccactaaaacaccacaggaggagaaggccgctcaaatgcatcacattggcaaggggacaacaatgccttaagtgacattggaaagaaaagacagaatgtacacacagatttcttcctgggatttgataagtgtgttgtgccaagattaattcttactagatgatttctccaaattggccttggcttctccacttatgaattctaacagcctgagtcaggtgttcagatagctgaggagattaaatccccacctatcttaattcactcagatttgcattgttctttggcaatataggcctacagttcattatgtacagctcccatggttgtgtgtttcttgattcagttactcatagtctgggaaatatcacataaatcacttgcagggtctttggaagtaccctataatcaaacactccgatttttgtagccaagcatttatgcatattcttacttggcacgacaaaactataaatcacaaagttcagctgaggcaaatatttgccaccaaactctttctgaatgttggaaacgctgacaagggacaattggcaagtgtggagttatggatcctaggagcaaaagttttcttttgagatctggcaagaatgcattgcttgggtttggcatgtttgggaaccattgctacataatcttgaatgtttaattcaccctcaagactcttaaagtatgaaagatccagaggaccggagacatacagctagttacactgtctaagatttaaagtcttaagacttgatgaaccgaaatcccgtccacccaccagaaaaatgctcagtctacatcagcttccagaatttcattctcattaggcagtaagggtggggctgggaggaaaaggaagaaaaaagaaaggaaggaggaaagaggaaatgaaggagggaaggaaaaagggatgaaaagaagaataatggaaagaaggggacaaaaggaaagatctaaatgattggcaagacagagggattgtgtagggaaaaggccagaggcagatgggcacctagtggaagggaggttgggttttctaggttatctcaatggccatggaagagtcatggtttctattcttccagcacaatgagtgtgagctttgtaacatctgctcttccccccctctacacactccagggaggtctcctacctagtgatgtcaatatgccgatttctcagagactccaggcttaatcaattgcaaacttgatcacaaaaaagttgttactattcagagttgagtgaaaccaggctgacagacacacagtaaccatccattttacaaaaatgtgtgtctgagtaagacaaaccaatgaataaatcatttttaacttcttcaaaaaatatctgctgaataactgtaaagtacctatttttagatgaaagctgagatgttgtttgctgccagttgcttgcaggacatggatagtcgcataatttctttattagtatcatggctcaggggcctatacaagctctgagagtgttcaggacttagtgcctatcaaaaggtgacatatttcactaataactctgatactgaaggccacaggcaaactgacattttacactcttcacttgaacaaagaaacctctcttttgtggtttaaaggtatctatacctgagattacacaggtggcttgttggagcagccagtggcagattgggtggctctgtcttgcctcctgtgactcccatgggcaggaacagcacatggcatgtcaacaaccacttttgttttgctttgtcatcagtggttaatatttcctgtcacatcaggaaggaacaacatctagaggcacaggcttccttcaactgatagccgtttttgatgtcataaactcttgtgttgttaaataagcatgccttttcatcatgactgtcctgggaatcatttacattagcaataccaaagaaaccccatcaaccccttctcaaggcagattccttgcagcagaatggtattatgctgggctttgttgtatttcctgtgttgggccaataatgggctttagtgacccttggttgttttgaagacggatgacaggtttccggcagctctttcgacaagcagacagctgtagaaacatcacagtaatgaagcaaacatcttgtggtgctctgggacactcctaaacatccagtatcctttgactgctgctctggggaatttccaactgatctgatctagacaatcaacaagcactgctcatggccactccctggccctggcaccaaccgtggtcagtcattgccttttcacaggcttcatggctaggcagcctttgagtattgatgagtctgtgctgattgtttgtcctgggcagctgttaaagcatgaagatttggtaacaaagggaaggggctctgagaacatactcttactacagattcattttagatatgatactatgcccttgagtcacacggataccaagcaaaactataggctgaagactgatagttattttttagtttttggtgttaaattgtttttagtattagtttcaatagaagttttaatttaatttcttcttagaatttcataggtgagtactgtatttatatcaccctccatctttttcttccagtgcccccatgcccccattccctctcaaattcatgacctcttaattattattgttcctccctccctccttcctccctctcttcccccctccctcttgctcttgctctttctctctcctttcagcagtcactggttgcctatagctcttcatctaggggagggcacttgtgaaatttcccccacccataccggcttatcagctggtgctgtctttacgcccgtctcgtttaggtcaccgtattgttgaggcttcacaagtacaagcgtccctgtcatgtttagaaaacactatcttatagtagacatcctggttcaccccctcttccactacttttcctaaaccttcaggttagaggctgttaaaattcttttccagtattaattcttagaaaatgagaaaataaaagccatgctctgaatgtgttactttgccagctgacagtacatttctctatctgctccttctatgaatgtctcttgttcctttacagcatacaataaaatgtaactcagagatgatggcttacatgcgacagcttctccaatggctgaggcagaatcacaggtttgacaccagcctaggcgacttagactttgtctccaaataaaagaggtttggagtagagctcaggcctaagttcttgcttagtgtgcatgaggctctggtttcaatcccctgtcccactaagataaaatcaaataaagcaattaaacaagcacatgaacgagggaagcaataaaaggtgagtttataactcctaccaacagcagaggtttgtaagttcctgtgaagcaggcaaacctgctaccagcactcaggtcaagaaatcaaatctgctgccatcaactcagatgccatcaaaatctgagctctcctggcctcaagtgtgatccatagcttgtcctgtcttgacagtcctcttgattttcctttacacttaaaaaattatctatcatttcccctctctccttcactccctccaagccctctggtatattccttgttctctttcaaattcctggtctcttctttcattaattattgttacatgcacatatgtagaactatatacataaatatccccaaatagataaatacaacctgctcagcctgtatgatactacatgtatgtatattttttttcaagtctgcccatttggtatgggataaccaattgtgaatgatgatttcacagcaaactgcctgtttctctgactcttacaatctccccaccccttcttctgcaatgatccctgagatttaggtgaaggaattattttgtagatgtattattttgtagatgggctccacaaatctgcattttggctgtggttttctgcaacagtctctgtctgtgacaagaagtttccttgatgagggccgaagactacacttatctgtgggtacaaggacaaatatttagaatgtagtcagtgattatgctaatttagtaaagtggtagttgtgggttatcctctaagaaccatgacttcactggccctgggtagttggctgggtttccagtgcgaggcttggttcccgcatgttgactgggtctcacatttgagcaaatacctttacacctctgtcacctggttgatcatatcctagaatttcagttcactctggctcacttgaagaaaactgagatgtcttttaagattctccctcactcttccctccccttcttttctggtgttaatctacccagcagggactagggggtctgtttagggttagggttgggcagttttggtacatatcacaatttcctctacttagcacactgtgaccttggccaatacctctccccagtgctcatcggttgtgggggattttctgtgcattttttcctttgttcatctgtccatccatccatccatctgtccgtgtgtgcacctgtgtatctgtgtgtgagggaaatatacactttatattaaagtagcacagctccaggtttcaccaaaacagaaaaacagatacttttctacctgtcttatttcatggatcagatttactttcttataaagcatgttaagaactctcaggctgggcatgtgtctcagtcagtaatgtgctcgcctagcatgatcaaagctatgggttctatccccagcactacataaaccagatgtgcatacctgtgatcccagcacccaggggatgagacaggaggatcagaagttcaagagcagccaaggctactcaggaacctgtctccaaagacaaaacggaacagtaacaactatgtgagcttggaagctggatgtgaagatacattccagatgttgaggcaggaggattgccataagtgttgagctagttgagctatacagcaagacctcacctcaacaaatcaaaataaaatcccaatgacaataaaaacatgaactgtgaactcgagaaacttaaatattccagcctcaagcaccatatagaaggaaactaacattcactttatgagtctagactttctagtttctttctgcttttctttctcctcctcctacgatactcccttattgctgcctactatcagttccaattggcggtgttttgttttgtttgggtggttctgggaactgaccctgggtcttgtgtatactgaatagtgcatcatgcagcccctcctcccccaggccacacaaaattcaactgctgtaattcatgccaaatatctcttgcacctgctccttttccttcctgcctgccactggtgccacacagaccctggtgcagtgtcagcttctctaggttggatcaattaagcatctcccaaatctcccccacccaaccctccccccacatctcctctcaccctctccatacccattttaaactttatccaggataattccaaaacataccaaggtcgacctactgcaccagtgatgggggatgtcctcctgtatatgtgattctcttattggttgatgaataaaacaatgtttggccaatagaggcaggaagataggtggtactaggagacgagaaaaattcttggtaaggtaggcagagggagactgccaagatatgcgatgtagccagccaaaggagtaacaggtctgggcattctctggtaagccaaggccatgtggaaatacatagatttatagaaatgggttaataattaagacagagctagccaatatgaagccctagccatcggccaacagtttaataattaatatatcacctgtgtgttttttggggccgattcagctatgggaccaggctggaaagaaaactccagcaacacaccagtaatattgattgtatcatcccctcttcagactcttcctggtcctcttatagctcatagaattaggggaaactgattttgaatgggaaggcctggtgtccatcggcaccctgagcttaacacacatccttgtctccagttcttctcaccaaaggccctctattctcatcataggtcctttacacacagtgtccctttccccaaatgtatttctcatccatagcaattacttttggtgtagttatgataaaatatttgacagcttaagaggagaaaaagagaataatttggcttagagatcaagggcatgcaacccatcatggaaaggaaggcacattaattgattggcaggagtgtgaaacagctggttagtcacgttgagtttgcctaccagaaacacaaagaagacaggaagtgggctagagtaagaaacctcaagatacccccaacctctcctcaccccatccccacacctgtcactcactaagttttatcagcctcaagaccttctcccagccagagaccacgcctccaaacacaggaacctatgaggaacaattgactttcaaaccacacagctgcagctcctttcttcacccaaggaggtaacttctaatgacctttgaactcagtgcaagcacagagtagctgtccctcaccttcaggcagagtccacgtcagaagcacccagtaccctggcttcaaagtctgcaaggctcattgatggcgtagagtgacagtccccttgccccacaagccctgagctctgccagtacagggagaaagttgcttctgtccaccatggccctcacagaacaatgtctgctacacagtgcttagaaaaacatgtattaaatatacaaacagatgcttgtttgtttctttagtcatggcatggagtttgcattctgacctggtccaagccattctgtttctcacaactactatgttcgtttttcttgtttgcctatttatgtatcttttgtaaattaggttcttaaaaaaacaaaactcatttcagtagtcacttagcttgctggaggcaggaggatcagtggttgccactcaccctcacctacatatcactttatgtcaaatcccagaccaaatttcacaaaacaacaacaacaaaaccccaggcaactgattctgtggaggccacaattctcacagctgtctgtgctctgcatcatcccagacagctacttcagagtaggacaaacagacgtgtatgtgagggggtcctgaagtccttagcccaggtgtttcatacggggagtttactcttggtcttacaatcaggctacccagaattccagagttctctgtccaaaggcggaggatttcttttcagcagaactggagaaacctgtgagttcttagggtcctgactcgtcttggcttttcagttttatcagagttctgatcgctgagattaaaaagagcaataaatagcaaagtctttcctgtgtatacgtgctcaccaggggatgaagcaaactaataggaactggcctcattttaaaaaaatttcaagtcattgttccctcgctgcttaagagtggctcaaaacaatccagataattatgatttattgtgaacattcccctgcacctgaggccaaggctccttgagcccacaatgaatgagtcattataacttgtttgtacaataaggatcggaaaacgagctcatatctccccctcacacgagtgataaggtgacacacacttcatcaggactaaggccactgacataaactccgaggtcagtttccaatggaataactcaagtgtccagagggacactggacaaacatgcttcagagagaacctgtattaaccacaggttagattagtgcttcaagaccggggataatgcgttcttttaaggcacatgtgatgatgtctctggacatttatgcttgtcacccctgggggggttgctgctgggtatataaaaggtatcgaggccagcatgcggtgcctgagtaagccatggggtaggactgcaccttccccacagggaaccgcatctccagatgtcaaagagggatgctcccgagaactcccagctcaggacccagataaggatgtctggcattcgtgatacaggtgactggctcaacactgaatagctggagcccaggactaacttctgcccgctctattccgctgccatcacacaacaaataatgttgttttgtccctcggtggcacaaggtgaaaatgaaagatgaattttatagtgatgaaggaaaacatggaaaccagcttaagattcttgggatcagtatggattttaggctttgagcctctgctcagcacctcctaattgactgctgttatgaccactagtctttcctccacatccgcctcctcgtctggtccatgaggcttcccccctctgccgatgtatgcccttcactgtttgctgtgttcaaacataaacacaaatatgtattagtatccatatccaaatacattattttaggtctcactttattcagaattttctacagcttgcttctctcgttcacaaacacttgggaagacatctctctgagattcagccatttccctacagatgaccgttttcctcccacatactttcttttgcatggtgaaacactaaaataatggtgtttggcaaagaatgttatgctgtgatttttttttcttttaattgggttttaggcatggaacggcatacttgagacttgggggagtttaggtaaatccagagctaaaacaatattctcgtttgtcttagggtttctattggctgcgatgaaacaccatgactgaaaagcaactggggagggaagggtttacttggcttatgcttcagcattgctgtccaccactgaaggaagtcaggacaggaactcaagaggggcaggaagctggaggcaggagctgatgcaggctgattactgactggctccccatggcctgctcaacctgcttccttctagaacttacagagcttccttatagaactcaggacccacaatgggctgggccctccaccgtcagtcactaagaaaatgccttatagccagatcttttggagcagtggtttttaaccttcctaatgttgtaacccttaaatatcctcatgctgtggtgaccccaaccataaaattgtttttgttgctacatcgtaagtgtgattttgctatggttataatgaaaatatctgtgctttctgatgatccgggaaaggatcctccaaagggtttggggccacaggttgagagctgttgttacggaggcctttctctagtgaggttccttcctttcagataactatagcttatatcaagctggcataaaactaaccggcacatcagttagaactagaaaatcaaaataccatccagagatccatctttctaatacaaatttttattaaatttaatttaaatgctatgggaatggagaaaattgtcaacaaatggttactttaggaaaaccctttaaaaggtacaagtagatggtaacaaagggattaaacgtggtagcaggcctggagagacggaacagcagaagtgtgcctactgctctctcagaggacctgagtttctgtcagctcagaacctctgtgactccagctccagtggatccgatggtctcttcaatctcacatagcatgtgtcctctccatgcatgaaataaatacatgtaataaaagattaaaaagaaagccatcgttagttctatgaactcttggtgtcgagtccacaacatattcagtccttcggtattcttcgggaaactgataaaagtatttgctgtgcagggaatctcctgctggtaagatccatgtctgctgatgtatgggcccattcttgggtgtgggctgaaatttaacaaacgttaatggagcgaacacatcaacagtttccttacttagatttcactaattgcatgaaaacacacagaggatagctttgggtctggagttaaccttctacaaacttgctgtacaaagcccacggccctggttagtctttttgaaaccacagtgactggatgagatttggcaacctcaacaacatgcaaattttctcccccatttcatccctcccagtgaaaagccctttggctaagcttttgagtctgctgtctggtgtgtgctgggaatggcttccggcagagacagaggggtgtgtatcctttccattctaaccttctgcaggttcccaagcacttggaggtcccctcttcgggttcttgctgcttttctttccttgtttatcgctccccgctgattctgtacttggatagaagagggtttcggttgcagagcctgcttcctgttaatgcttctattccagaaacagatgtcatgacttaaatataataataaagtaaaaataatgatatccagataacttgagccaagtgagaatgacttttcagagagaattcctattttcctttttataagccgggtataacagcatccgtttaatgagatgatgatggagggagagcctgcaccgtgattttatctgatgtgtggatgagcattctgctgagataacgtaggagtcagagtcacggatctcagtggcagtgatctctaaacacaatagttgtgaacagaaggaggagtgtcctgtgattgataaggcagaatgctcttctatatcagtgatctctaaacacaatagctgtgaacagaaggaggagtgtcctgtgattgataaggcagaatgctcttctatatcacaaatgccagcagcatatcatgttcataatattcaatcaggtccagaagtggagtgaagaaatttctggggccggagaggtggcacagtgactgagagcactggctgctcttccaggggacccgagttcatctcccagcatctacaacaggtgactcacacccgcctctaactccagttccagagggtcttttgacctctgagggcacttgcacacaagtgcatcacacacacacacacacacacacacacacacacacacacacacacacacacacacacagagcaatacacacatcttaaaaataactttcagaattcttttcactggtttaatagctttttaagacagaagacttctgtcctcattctaattttagctacagcatgaagttctcagtgtgcagtaaattagtaaacagtaaacaattggatgcattgtaagaagtcatgttaaggaacatggcatttggaagagatcaggactgtaacaaacatatctcttagtatccgaaggactggaattgggaaggcagaatcaagaagagtccagctctaagagctcactcctggtgtgaccagcttgatggcatcaaaaccaacaaataaaaaccaaattaacacaagaaccatgagctcttcaggccccaaaaggcttcctgccccagagtccactatgatacttggctggaatagaagttatttctagtaactgttcctcctgtactagttaaatagtgatagtgagccatatcttctcagactgtaaccacaaggataaagcgtccactttcagagtagccagagaatgaggagatgagtcattaagtggagaaaggatttggggataatttaaagcaaaacaactaaaagtaccagagagaacccagaaacttctatatttgcacagtttcctaacagatcacaaaatacaactcttgtggtgatatttttcaactgcagcacggcgcatggctgagagtgaaaacaagtaaagtcagaagggatcccagaatggatgagacttttcccagatctccactctgttggccaccttgtgccctgccgttcttccaaaggctggcacaagctccagccgctactctacgtaaatacttaaactagaagctgcacattatttgtcctagctttgagagctctctttgcgtttgtacctttacaaccaacatctggatgtacccatatccagaaaagctttggggtttgaagcatgcagtagcaagccctctgaacgcagctccttgtgtgaagacagacccctagtggccgatgtctggaactgcaaaccagggttgttttgtgattccgggccttggggtttatttaatttaggcttttcccacccatatcctttccccactttctgggtccagattgctgttgaaggtggacacaacgcagctgtgtgggagtgactcaagttcaaatcaagagacttccagaacggttacatcagttctgtgaaagccccgagtcacagttctttgaagctggctagcacaacatgctaacaccttttaagttaaaaaatcttttgaccgagaggctgagcaggagctttagtgtttggggcaaactcttgatcacctaaaaactcctggatttcctctgtcacaacaacatgcttctgtgttctttgggggactaaaaaaatgaaatgtgagaagtgaactccttgggcaccaaagaaacggtgattttgagcttctgagtgtggccctgctctgcatctgaccccgtattatggctaagtgtggctctgaaaattgaatgccacaaggaagcacaaatacacctggaaggaagccgggcattggtggcacacgcctttaatgccagcactcaggaggcagaggcaggcggatctctgtaagtccgaggtcagcctggtctccagagagagtgccaggataggctccaaagctacacagagaaaccctgtctcgcaaagaaacaaacaaaacaaaacaaaacaaaaacacgtgaaaggaatggaatgcctcccctctgatgccgccctgtcagttccagcgcctcacctgctctcttcatttctaagaagcttctgtcttctgactgaaagcagtccctggacattctctggacacttggcagggagagaacacgtggattcttgctgtcaccattctatctgtaaatgaggagtaaaggcatgcatccaaggacgagtgcctgcagtcaggtccaagtgtccagtgaagtgacacactgtggctgaaggttcactcatctcttctgctgctatctcagaagctgatgtgtagtcagcatggctggatctcttgtggcacatttctaggtcgttctgagcctttgtcatatgtttgctactgtgcgcatcataccaggtctggcagccccgtcttcctgcttgtgtttcaggctgtgcctggtgggcacacagcactcctgctgtagcaaaaggggaggcaagtacccatgcttaagtccaattcaggtctcctatcttcatctaacacacacacacacacacacacacacacacacacacacacacacacacagaaggtaagggtgagagatagacagacatgtggtaatgtatattcagggtccaactggtcaatgatcttgttttcttccagaaagaatgggaaaagatatcaacccccctttctttctttcaataaaaacacactcatttaaacagttcagtgaagtaatgggtgtgtgttgtttttcttgttgctatgaccaaagcactggagaagaagggtttattgtttactgagcagctcgtggtttgaggggatgcagtccatcgcggcagtgacatcatggcactgtggacatgaggtaattgcactggagaggactctctgctcagcttcttttctctttgtccctctctggtcagtctgtacttccgaccacaggatggtgctgtcatattcagagacggtgttccctcctcagttaaacaccctacagacatgcacataggctggctcagagctgtgtctcccaggtgattctaaattcagtcctgttgacaatgaagactggtcctcatcgcaggacatagcatctccccatcctcatgaacattggtgataaggcttctgacactcccaaagggtggttattgtcacaactctatgaatgagctccagttaaatatcatgtacaccatcccattcagaaattctgagaaaatgtttctgaatttagaatttctcaggtggcatctctgtgatatcacctatatgttctctcccatcggggcccagatcaggactccacagttgagtgcatggatggttttatgatggttgtcacaggacaaggggtctgaccaagtgctgtcagtgaaggaaactccttctcatcagtaaaacttgagagagagaaagagagagagagagagagagagagagagagagagagagagagagagagaggagtgagactaagtggcgggtaacaaactgtggtcttggatgtacatgatggaagaactcctcacagacatgaagtccaggagaaccttacaatttcccagaaaccatgggttaggcaacagagatctcaattaggccacttgcataaaactctaaggctttcagaagaaaatgtcagaaaaaaaaatcctcatggtttgggtttagggagaagtgagaaaaaattccaagatcacggtccacaaaataaaagcaagattttttttttttaatgaaaaatattgacctgttgaaatcaccatctgctcgtatccactcactgctgggttggaaagtggtacagccactttggaaaaccatgtggtcttggctttataaaattaaacatacactccccagggattccaagttcgtgagaatgaaaatgtatgtttgctttaaagccaatgcatacatgttgagggtagctgtactctcactattccgacctggaaacaactcgaatgtccttcagtagaaggaaaggcagcctgcactacatataaaatgctctgtgacagacactgttctcaaaaggtaagtgctctgagaacagtgacagctgggaactgccggccgaagggaggtgtggcagtcaggaccacagtgaatgggatttggggtgctggtaccatgctgtacactagttatgatcatgatgcagctgactacagatgctgacatctataggactgtccatcatagaaaagaaaaatcctagaagccagtgcgtggtggggactttgaccttcatcgttgtcagtgtcttcattagacagtgacgcctgtcactaccacggcacgcatgacaagatgccacgaggggatgtgtaaggcctgtgggtgcaaagatgactcaggaagaggctctgggactgggctgggagtaagaccgaaaggcaaagaggcctatgtgactgacactcaggaatttggagcagaaagaagcacagtccacagggtgtgtgagcacaggaatggcagcctggccaagatggaatcattaacttttctgttgttacttttcaactgtattgttttactttgaccaaagtaagtattactttccatcagataatgtttgctagactatggacatgttggaatgtgacccatgtataattccttttacataccatagccttctgacccatcactcatgaaatagcaaatgaatgacagatgacaccagaatactttaaacatcacaggcctttacaatattgattttctaattaaggcatgttcattagcacagctgctgtcctgactatttggaagcagggtgtgtgttctactcatcaacaggagtagagtctgtcaccatgctatttgagtggcacttctcaggagaaagtccctaaaagtgagtcacagtgatgagtcatgtcctatggcattggtctttgaaatcaaagcctatgtcatgtcctcttggtgatatctacaggaaataccaggaatgccaaagtagatctgggagaggaccactcatctgccaggataagccaccaggcagtcattcaaggggtgtgtttgcagcaccatggagaccacactgctattttcccaggagacataatctaaatccagagccctgatctgaatataaatactgagaatgtcatgaatgcagctccatacactaagcccaatctccgtttccctctaggtgagacagaggccacccactacaacaacctgatgtgaattggtgacaatcaaggcccttgcttagaagtcatccctatgcccatctgagtgaaagggaaattcaaagtcagagtgacaccaggggtcagcctctgtgaacagccagcccattccctccttgtagaagggactttcctaaagtaagggctgggtattttaagcaaagagacccagctgtgaaaataccatttctccagttgcttcctgctgggcctgatctcacttgcacttatctctggagagaagttgctgatctccctccttcttcttctcttatccctgctgctcctgggcatggggtgggggcggctttgagaaatgacagcacctccctgtaattcttctaggtcatcagtgttctgtatcagggcactgcctgactaattagcattaatacatgatattgggagaaggaaccctggagaaaaagtagcaggcctgtttgtgccaattggagttgacccaactccaacaatcccccagcatactcagtctcgacctttgttcctgctgccatgaggttttgggagccctatggagtgctttccgtcctagaagacatgaggacttgacttgtttaacaagcttcctttaaaccctctaacatgtggactcgatatcacgtatgtctcctaccatcttaaaactttgatttggagatacagtgagcatttatctagttagtcattcattattgagtgcctactgtggacaggggattgagctaaaggaccgatgatagagccttcatggaacaaacagaattttattctggagggaactaaaataggatgagaaaggaaagctgggaagtgaagagacgatcttgacagcagaaaagcaaaaggccagtcagagggctgtaggtccaaacagtggcaacatctgagttcctattcaaagggtttggaaacaggctctcaacgcaacatttatacatcaatgttcattatagctaacaacacagaagcagcacaagtactcactaatggatgaatagataaagaaaatggaatattattcagcctttaaaagcaaggaaaatttgtcaaaatcatagagacaatgaaaaaataatgcttccggggaaagggtaattactgtttaatggtatagaggtttggatttataagacaaagtttgtagagctggatgatggtgacacatatgataccttctaaatgtgtttgatgtcactcaactgtcttcttaaaagtaaaggtagggacatttgttatgtgtcttttacaacttaaaaaaaataggaaaggaaaagcatgtgtcgtagaaaaactcaaaatttgaacccttcctcatccccttggactcattatcacaaacaaatgaagataatggctgggtggtagtggcgcactcctttaatccagcactctggaggcagagactggcagatctctgggagtttgaggccagactggtctacagagagttccaggacagcctccaatgtgacagagaaaccctgtttcaaaaacaaaacaaaacagcaacaacaaaaaaagaagtgatgataatggttacacttagtagctttgttgtaggtaattaaaacaacagctacaacccacttgacacagactagggaattggtgaatagaaattgtcaaggtcaactgtgactggcctatggtgaatggtctgtggagctttggtggtaaattctaaattgtcaatgttgcacaacctagacccacccaggaagaaagtttcagagaaggattgtctaaagcagggttgtttgcaggtatgtctatgggagattgtcttgactgttagttgatgtgagcagactcagtccattgtgggtggcaccattccccaggcagaagatctttttactggagtagggagtggacaggtcttggtacttgtaagcctgcatgtgtttattctctatcagctcctgactttgttgttgcctagacttccctgcaagtagaactataataaattcttgtacctgtttgatggttttgccattatgttttatcatagcaacagaaatgaaactgggaacagaaatggaacaaaattcagtttggagtctcaagtaaaatgacttggatgctaaattacaggagttgagctttattccatgaacggaagaagcaatggtggccagatgctgacaggacaggatcgggggactgttttcttgacagtaaaaggcagattaagagcagggcaagaccaaatagccagcaactacctcagtgactctgctgaggacacaagaaagggacgctctatccagttctaaaatgttcttattctattctacaaaaatctgaaagtggcattaaggaactttgagatagggagtaaagcaatcctattttctaaccttgatcgacctctaattttaaaaggtgtgttatttttgtgtgtgtgcacgtgagtacaggggcatgctgaggcacgcctgtggaggccataggataacttctaagagttgttcctgctttccactttgttttgaggcaggggctctcttgtttctgatgtcttgcatattctaatctaattggtatgtgaagtgctaggtagttctctctctctctctctctctctctctctctctctctctctctctctctctctctcttctcccgtcattgaaggacttctgggtgcatgtgatagcatgacatccagctttttacaagtctgtgtgtcaaattccgggtgccaggtttgtgcaccttgtggttttaccttctgggccatctctttggtccagcctctgattataaaaatatttgagtaagcactttgcatttggtgacagaacataaatgtgatgttgttttcacccatcaggacccacacaccacacagagcatgcccatgactttgtaactgccagacaggagtgcagcctcagcttctgggagcctgtgcctccaagacagaccacccagcttccaagggtccacacagacccggtttaaaaggacaggaataatcattttggaaccaattcacatagaagcttttccgatgtttattttgacattaaagaacattttaggagattaacctaaatgtccaaaaaggaggaaatcattaaataaagacgtgtaaaaaaaactgcccagccactaaaagcatgcatttagagatcatttagtgacatggaaaagtgttcacgatgtatgaagggaactaagtgagataaaaacctgttcactaggatataatttttgttataaaatcatgcttacataaacagaatgagttttgtatttaagcactataagagcctgcattgaacttttagcagggttggtctgatggaagaaactaaggttgttttaactggggggttgctacttggcagcctcagatgacctttggcctccagaaattttgtctccatcttttcctgttctatgggatgccccatcaagtcttcctccaaggtcccccactctgctcctgtcacagttttaggtgacctgctggtctgtagtaggtgttcctaaagggagttttcaactttgcagttttccataaaaggggaaattttcactcctaggtttaaaaaaagcaagttttactaattgccatcaatttgcagtctgcaactttcatcttttaaaagattggttctatttgttcatgtgtgaggaaccaaatctggtcatctgcaagatcaacaagttctctttctgaaaaacagagtcctcatttggacccacaggtaacctaacacaggatgaaaaacccagtatctctgccttaatctttgtctgtctcctttgctttgggttgcatgctgacctgtacaggttagggtgctaaccccacagtcaagaactgtctgtctaaccagtttcatccccatcagagctgaaagaatgaatctaagtcagtgtcctacacctgggatcacaagaattggaaaggaaaacaggcatgatgaatcatcccagataagaacgattcttgatgtgggtgaggctcacttaagagaagccgccatcttgcagaaactagacttgcagattcataagagagtccgtgctgcactggggtaaccttgacccactagataactatgcaaacttcttgccacatacctcagttcttcctctttccaaacaaagctcatatggctaccccaaagagaaactttggggtactcaacctcttcccaacatggccacagtgaataaagctcttgttggttgtcgctggtacatattactttcattagcatataggaacaagtggctgagcctaacttgttaaagtttctggagcccagactgttaccctaaaactctagttacaattattttcctgttcttcttagctgtctgtactaaacccaacagttgtgcttgctgacattctgttgtaaagctccttcctccatcttgacattgaccctggccatcagaggcagaaatactaggagaactgatggggaatgtacttctgtgtatgttcatcttattgactgttgaataaattactgtttggccaatgaggcaacaagttagatgggactaggagtcaaggaggattcttggaaatgtaataaagtagtggtgatccaggcaggaagtaacatagcaggaagactcatatttaagcaaggacaagcaggaagtgggtctttttcccctttactcttcctcctgctctctgctctgagccaccatctgctgtgatccctggggatgaggacactagtagaaggcgtctgataagataagtcttataaaatatatagatttatgataattaagactgagctagcagatgagaaatcctagtcattggccaagcagcatttgtacctaatataagtctctgtgtattattttggccatccacatggtgggcggaactcaagatagtggtggaaagatttatcataacagagaacctttagaatgctttgtcaggtggtcagggcaaggaaatacagcagttaactggcagataagtctatagtaacagaagcagcagtgtggctgttaacatttcctcctgggaggagaaatgagagggctacacaccatcagctgagctcccagtcaccacttcctcctgcccttcaagatgttcatggccttggggattcagaaggcacagaaagtggagcggtgactggagtggagactctggagatgcttacagttgtagtgctggggtagacaggaggatctctggggcttgctggccaggcactctagcatacatggccagctaagataaaggatggagaagatagaggaagacatctgagactcagcctctacaagctacccccattccacatatttctgttgtctatgtttaaatttttatattttcttctatttactacgttgtaaattattgaagagcaaggagcctaatttccatttatatccttaagaatcaggcctgatatatagaaaggtactaaaactactaaaagaataaggagtgagtgaatgagtatttgatctgtaattgaaatatatatatatatatatatatatatatatatatatgtgtgtgtgtgtgtgtgtgtgtgtgtgtgtgtgtgtgtgtgtgtgtgtgtgtgtgtgtgtgttagaaaacaataaaaataaatgcagtcctcaaccttcatatgagaattttgatgtgggggttttagcaaactaaatgctgcaccctagcatttgcatgagtgtatcgcctggaattataccgtgtgtatgtcatttctctttcccaaggcaactccatctttgcatctttctgtgtcttcctgtgtgttctcttgagcagctcctacagccagcacagtgtgacccacagagcttgtttgaatttttccatcagaaaattttgaatttttccatcagaaggaaaaacttacttgtcctaatgccctctttcaggagggcaaacataatgcttcagtcattggaaatcatattcatctatatgtttcaaacaggaacctaaaaaaaatttaattactctgggttagccctcctataaggccctaagtcataagagggggaaaaatgtctaccaccatggttggtctattaaagaagcccagtgtagactctcaagtatgatataaacctcttccaaatacccaaaacccttggttcccaagcggtctgttatagaaggagaatagcatttgcttgcaacacagttattctatgcagaacccacaatcccaaatcaggttaaaagaacaagtctaaaggaagttgatgtggttcacattttttaaattaaagaacaattcagactccttttatagctgatgggagaatagtggagccgtcttactggttggtaacagtcctagaatacataaacagcaaacagtgctaaacccaagtggaaacccaaagactggagcccagctgcctgtctgaagtgtgcagccaaactgccatgatattgagacacctgaggacattggtaggctggtcacccagactccaagaataaatattttatctattaaataaaattgtattcattttgacagagaacagttgacagtgtgagctctggagttagggccttccaccagagttctaaggccatccctggaacagtggatggagagcaagtgtggcctgggatggaccatcagtgagtaacatctgcatatggaaaacatacaagatgggatgccaaggagctaaggaaagtgaggctggctatgggttttctgtttcttctctcacttgatccttaaatttcatctttaagaatctccattcaggtaaattaccattcaaagagaaaatagacaaaataatattaccaccactactactactactacaataataataataataataataataataataataataataataataataacaacaataataataataaaaaataatgattccggtgggtaatttcagtaacattggaacagaggaggtcccatgttctcagggtggtgaagaggcaccataggggaagttccttgaaaggacagtctacactcttctcacccagttggccctcactggtgttggagagctcttggtacctggagatttgtgaaaggacagcaagaagactcaggctccagctctccaagttgctgccctcgagggcagctcagatgagcagatagatgcaacaagctggcacagcatggctttctttggctgctaggagagtctatgaagctgtccactggccactaggacagcccagcagatcatctggcatgccactggccattaggatagtttacctctttgaccttgttagctgctctgggagataaagcaaaattcagctgttttaaatgtccccaaaagtccagggttctaaggaagcccccccaccccatggaccctaatataagaatttataaaattattttagaagttgatctcaagagctgtgttctgaggctgaggtgagaccagaaagaaacaggaagccatgaagtattgctcatcacatgagccctaagatgactctactggggaagtgacaaacaatgagagccagtagttttcagactcgtgtcaatacacctggagcattgtaaaatgcattagggctccagaaagctattgttttgtgagccatgtctaacaatattgatgtattaaaaattaaaagagaaaattctgaagtatttgctaatttaaaaaactaggaatactacagcctgcagagatggctcagttggtgaagtgttttgctgagacacagagcgaacaggacatggtggctcctgtctggaacctcagtacttcggggtgagtggggtggtgggagcagaagcaattggattcttggagctcattggccagtcagtctaccccaggagatgagctccaggttcaacgagaaaccctggctcacaaaatatggtggagagtgatggaggaaagacaccagtattgacctctgacctctgcatgcaagcacacacacctacatgcacatgcaaatgtacttaatgtacacatattgaacccatgatggccaacgcccacacactactgaacacagtgcatgtcagaaaaatgacctgcttgccttatggtagcagctaaatttcctagcacgaaaataacctggaaagaatggcacgatattatatgttatgccttgagtagctactttaatttttaaaagctagactctcacatatgctactcagattgatctgttgctatacattttggctgaactacagctggcttccaatggttacatggttgaaaaggaaaggaggaattttaatgccccctcagataattgtgtatgatagtaaaatttcacaagtgataatttattaatggttagtttccatgtggagcctttctgggaaattttatactctatttcattaaaaccatcttttaaaatcttatactctgaacatggcttttaagcctgcttgatttctttttttctccatttttatttatattagaagcaagattgttttacatgtcaataccagttccctctccctcccctcctcccttgccctccactaacaccctaccaattctgctcccatggagagtgaggtcttccatgggggttcttcagagtctgtcatatcctttgggatagggcctaggccctcccccatgtgtgtaggctgagggagtatccctctatgtgaaatgggctcccaaagtccattctaactctagggataaatactgatccactacaagagaccccatagatttccaaggcctccacactgacatccacattcatggggtctggatcagttccatgccattttccagtgatcagtctggggggccaggagctcccccttgttcaggtcagctgtttctgtgggtttcaccagactggtcttgaccccttttctcatcacttctccttctctgcaactggattccagttcagttcagtgtttagctgtggctgtctgcttctacttccatcagctgctggatgaaggctctagaagggcatataagttagtcatcaatcttattatcaggggagggtatttaaggtagcttctccactgtcgcttggatggttagttggtatcaaccttgtaatctctggacattttcctagcgcctgatttctctttaaacctatactggctccctctctgatggtatctcttattttgctctcctctattcttttccctacaaaactccctgctcccttatgtcctcctcatccctgctcttctctcctttgaatcaagaacagataagcaacctaaacagacctataacccctaaggaaatagaagcagtcatcaaaagtctcccaaccaaaaaaagcccagggccagatggcttcagtgcagaattttaccagaaattcaaagaagagctaatgccgatactcctcaaattgttccatacaatagaagcaggctacaattaccttgatacctaagccacacaaagacacagctaggaaagagaactacagaccaatatccctcatgaacattgatgcaaaagtcctcaataaaatactggcaaatcgaatccaagaacatatcagaaaaataatccaccataatcaagtaggcttcatccccgggatgcagggttggttcaacatatgaaaatccatcaatgtaatccaccatataaacaaactgaaaaagacaaaccacatgatcatcttactagatgctgaaaaagcctttgacaaaatccaacaccccttcaggataaaggtcctagagagatcaggaataataggaacatacctcaacataataaaagcaatatacagtaaaacaacagccaacatcaaactaaatggagagaaactcaacatgattcccctaaaatcaggaacacgacaaggatgtcatatctcttcaattttgtctttgaagttctagctagagcaataagacgacaaaaggagttcaaggggatacaaattggaaaggaagaagtcaaaatttcacagttttcagatgatatgatcgtttacataagtgacccaaaacactctaccagggagttcctacagctgataaacacattcagaaaagtggcaggatacaagattaactcaaaaaaattagtagccctactatatacagatgataagagggctgagaaaaaatcagagagacatcaccctttgcaatagccacaaacaacataagatatcttgggttaacactaatcaaacaagtgaaagaagcacgttcatacaacaaggacatctgttcaactatgttcatagcagcattgtttgtaatagtcagaacctggaagcaacaacctagatgcccctcaactgaagaatggatagagaaaatgtggtacatttacacaatggagtactactctgcagaaaaaaataacctcagaaaattcacaggcaaatggatggaactagacaaaaccatcctgagcgaggtaacccagtcacaaaaagacaaacatgatttgcaccaactcatatatggattttacacagagcaaaggattaccagcctacaatccacaccactagagaagttaggcaacaaggaggaccctaagagagacatgcatggtcccctgtggaaggggaaagggacaagatctcctgagcaaattgggagcatggggggaggggagagggagccggcttgactttcataaggctgtacaccactcatatgaacaatattgatttacttgttcagcaaacaatctgaatgtggacataccttctttcaaaacttcaagaattcatgtcaatatctgctatcctcccataagaaaaagccagtagcctggggaggtctttcggctcacagtggtggagtatgaggttcctcaaattcaaattttctcttggaagcacagatttcatttttggcaacaaatgccgccagtggttcctttgaagagatggcctcacactgtatagtcagcagacaatgggctctagttttgactctagtcatgcagttggtatttagactccagcatggacagagctgccttatgtttggccttttttccccatcaaataggctagtgaaggcttgcagttgcaatttaataattatttgtgtggctttttcaaggatttatcttttttttttgtaaaaccaactcttcttcccatcagtacaaatcacaaacagggacccttctgcaggtgcccgccagattcacatgaagaatggcaaattggccaaggcagtttttgcactgccatgcaaatgtcagtgccacataaaaggaaacagcatttgaaatcatggcaatgcccctccccaccctgggatttccaggtaatcaggaaatagactttgaagtatattagaaggtattagaggtgtcccctctaaggagtgagtggactggaatacagattgagggctggatcaaagaggatgggtgaagagagcctgggacttctactgtgctcatgctcacaggcagaccattttgcaagaacagagaacaggccccactagggtgtgtaagttaaaaaccaagaaagcatgctctgactgaaagataccaaggagaaacaggtagtgctaggatagtctggtacacttagacagagtaggactgggtggggagggcatgataccttcttgcccctgccctcaataagaccggtccactcttcctatactgggtttccatgtaacagcttgttgaagaaaggttttcctcctcatgtgtaaggatactgaattcatttctaaatgacactctaaacctgctcacacactctcagtgacaccatgacatccaaatattctaacccaaagggggcaagagaaaggaaaagcgttaatagatccaagaagtttcaggctgatttcactggtgggccttcacactccatgacatggatgaattgtttctgtcattgatctttccctcttcctcaatcaggtaggggtttgccttcagtctgacatctaatgtggcagtggggagtcatcagctggcactgtttgaagtcatggtcgggtcgatcagaaggagggaatctttctggttgcttcagagaagctggaagggaggctaagtcggtttgggttccacacttgcatgggaacctccagggctgagactgtggtgtaaataaagcaaagccagacatattcttctcacaaacccatatcgtcccagatagccaatgttctgccattcacaaagttggtgtaacatggtgcaggagcagaaatgcccccagatcctcggctgagtcaactgcagctctctcagaggaaagatgtttttctccccaggctaaatgggtttgggaaggaggagtaatcactattaaagtcacatgccaatgtggcttcacccatgtctatttcaatgcattgccttgcaggttacaggcagcctagctcaaagagatggataaaaaatggccagttatttagtcttctaagtggagcttcagggtaaacatttgtcatgtgattgctgaccctgcttaatctctgataaacccttccattatagggcagatagagcaagaggtaaattaggaatgattacaggaagtgacttttcttgtacatatgaaactagattaacagccaagtgattgtctgcctgtgagttttgtatattcttgtttctggttaattgtggtaaaaatacataggtacacacatacatatatacatatgtaggtacatacatacatacacgtatacacacatacaaacatacacacacatgtatactttctcacacacatatatgcttcacttggtagactattttaaagggtactacagtaaccatgtgtacattgttcagcagattttcgaaacatcttttcagagtcaccaagtggtcagtcttgagtggccctctcctcattttctttattcatccaccagtgggaatttttacctcttagtcattgtcataacacaccaaacaaacacgagttctctctctctctctctctctctctctctctctctctctctctctctctctctgtgtgtgtgtgtgtgtgtgtgtgtgtgtgtgattctcatgtaccccaggctgtgtatttttctacaatggccagctataggccttttttttatttcactctattgatactattgttttggttgtagagaaaaccccttgattcaatagagtctgtctttctgagcatgaacatccagttatctcaaccctctttcaaaaggtgatggacccatctgtgtgcccttcgcatcattgtcagtggtctcatgacctggtttgtattggtttatacctgcctgtcttgtgtgttctgctgtgtcgatgcctgcactcaagcaagggtcacactcttttgactacagagctttctcacgagtaggcgctaagaggcataaggtctccagtataactcatctttttcaagattattttgattttctgggtcatttatggtgccatattaagtatagtgaattcttctgtttttgcaaaagaaaaaaaaaaggccattgggctttgatgaggatggacttagacttgtaaacagctttgggcagtgtaccgttttaacagtcgtaaatcttcctgtccacaaacacccgtgtttccttttatttgtatctattttagtttctttcagccatgacttacagttttcagagtataatatcatccacctcccagctcagcttattgccactttcttcttcttgatgcctttatcaacagaaccgttttcttgatttctttctgccctattcattcaccacactttccaagaatattcttctctcgacagcagcagaagaatttacactgacagcttctctcccagaatccagggttttcatagacttagtgatttgactctttcattctgcacttgagaaaatcagcaaagttattatttcagggcttcctgaagctctcacacagaaaggctccccatgtcctgaagttcttaccctgaggtcctctcccccacacatgtatcccaggggtggtgatggcgatgataatttacttttatgttatgtgtttgaatgtgggtgtttgtacatatgtatgtatgtatgtgcagcacatgtgtgcctggtgctgacagatgccacaagagggtatcagattcccagaactggaattatagatggttgttgccatgtgggtcctgggaaccaatttcagaccatctgctgtactccaggatagggaaagtgactgggagcaaaaagtgaaaaaggaaggaaggaaggaaggaaggaaggaaggaaggaaggaaggaaggggagagagggagggaggaaggaaggaaggaaggaaggggagagagggagggaggaaggaaggaaggaaggaaggaaggaaggaaggaaggaaggaagaaaagaaagacagcagagctaccatggaggccttgaaagggcccgtgtgatctcatttttaagagtagggactcaggtcatggttgaatcagggagcccatgccatgttggctaaatttttaagattttcaggttttgttaattaagaattctgttgttgtttacatgtgtgtgagtatatgcgcatgccacatgggagctcctagaagccagaagaaggtgttggatcccctagagctggagttaaaggtggtcaggctgagaatcagactctggactcaggagaagagtagcaagcactcttaattgttgagcaatctcctctccagcgggagtttcttcttacagggcaggcagtattaatgcagagcttgcaaagtagagttcactccgtgtacaaatgtttccactgcaagtgtcccccccccaaaaaaaaaatcaaagtagaataaaagccattgttgaggaatagcctttaaaatcgaatctctggtagcaggattctaccccggccccgaaattccccaaagtatacaatttcctttcagttctaaaacataaatcataatttgtgctctttatggggcttctgccttttgtcaaattaacagttctggaaaaaagcacatacttccagctgacctgcagttggacctaacatttcttccccaaactcagctcaaacttttgtgtcttgggggagaacgcattcttttagacctggctgtgtgtggcccggatcccggtcttgggccccaagctgtttaatcgctcggcctctggggggctgctctgggctaatgaacccttagctctaccttttcccttctcttaatgagtgctaataaagtgcatttaactccactaatgcaacaaaactcactgttatttcattgtatctacttaataagaaccctgtttaatatcaagttacggtctgctgggccaaagcattacgctggcggaagtgagactgtgagacgggagtatcgggtgccctaattcgggcatgctgcttccttaatatgccctgcagtatgataccattgcttaattcatttagcccagctagtttgatcccacagccaactgctgtgtaagatttactgcactgctaggcaaccgtcccaccacacaagctaaaatacagtatcgcttttcttgggaccaagctattaacagttgtttgggggggagaagcaacctgcaatggagcagatagagttacaagaaggaaaaaaccttggactgcccccagtttctgaaagagttagagcaaatccaatttgtattaataaaaaaaattcccctcattttcatggtctcctcccagagctactttgattctggatatgtctaaaatgggcagtgatcttcacattcctcattaacccaattatgaatttctctggcttctgttaagtcagaccttcccacaagcacctcttggtaacaaatatctccgaaaaggtttctgtttagagaaaagaatccttttataattacagcaacggattctgagttcaagcttcatgcgtattggattttgttagagtaacacatctttggtgtcattactttcaaactagagcaggcagctttattctggggttgcctgcctgatattcagacattgttttacagtcctcttgcaaaatcacatgaggagacattttcagctgtattggtctttgagggttctactctctctgaaggcctgtgtgttaaactcatatataattcacacagatgcttgagggagctaaggggaaattaagacttccccatgcatttacaaaagaaaaaggaataaaaatggaagttaaaagtgtgtgtgtgtgggcagctcacaaccatgtgtaactacattcccttttctggcctctgtaggtaccagacacacgtgtggtataattaatcatgtgtaagcaaaatgctcaaacacataaaaaataaataacatgaaaatttaaaaggaaaagaggtagagaggactagagatgaacttccttctgttggtaacaacaacgacaataaaaaacaactgtttcatacacatggaagatagtttataaactgtaaaggagacagagtcctctgctaaggctttgtagctactctcatgttaagaaaataagtgacattgcaggatttccctctgcactgacttggtaaatggcacttgagagcctcaaagacaagaaggcatgcgtgttgaatttacataagtaccccaagtcaaaatgtgattatgtttataaaaagcatagcctctctgttctccctgcatccttgtttctccttggtgtgtgaagaaaaatttcgagccaaggaaaaggtcattgctgctggctgtagtcatatcccattgcatcccaacatctaagaaaagtaaatggttcctcccctaaagaggaagaacatctttgttcaaaggctggtctacatgagacaaacaggatgctttatacattgactaatagagtgaatcttttctttttcttccaagccctagtttctagccaggaaataaatttcaaaatgaagtgacaaataatttccaaagattgcatgaagtaccgtcagcaaagccagtatgtgtaatttttagtgggatgggggtactgatgtgaaaatgtggcctgcataatctattttcatctctctttttggaagtctatggctgtaggtcattttccttcttgcatccagtgctacattgtttcttccaggctacgtttactttcaatgtattgagaaggacatggtccaagaggctgtgtggtccaactgcattggtctatatataacccaataaaaaataagtttgaggcgattctgagggagcagttaggtattttcttttagaaccctggtcttcttaaaccctgggcttggggaagattagctttgtgcaaactcagtcattgccaaaaccagctaggattaactggtctcacagtagactcatccctccgtgaagtgtagtgctagctgacccttgtaaccatgagaaggagcttcggttacttcagggaagaggctaaaaagggaaaaggctcattatctccccagcaggccaaaactgcaaaaggtatcttgaccccctgggatcctaagattaaatgtcaccctggctgaggtagccttgcctggggttcctaaacttttcgttttctcagcacccagtattttcgaagtgcttgttataaagtgtcgagactgaagacagtgaagagacaggtgaaatgcctccgtcctgagcctgaaaatgtctggaaaggagagtcactttactgtaaaatgaagggcctcacatgggcttcattgtgtttgtgactatcacagacaccactgggcagtaaataaatataagaagggctgtgacaaggatgggaacattttctagaagaagcatgacaagattcaggaaagagcaggtctgaagagaaggagcaagcagaccccttctgctacagtgacacaagggccagttgaccaggacacagattgttggcactgtaccagtggcttaattggtcaaggcatagagtgacccctggagatctgaaggcttgaagaggagaaacaaaagtaggaaaaaggggggcatacaaaagaaagactgtagaagaggaggaggggtgaggaagagagggagccaggggactacagggagggaaagaaggaagaaggaggcggagggagggagggagggagggaagggaagaggaaggaaggcatacaggaaaaaaggaaggagagagggagggagggggagagagattttaaaatacactattacatcaaacaagaccaagactaacatatgaggttgtcctctgacttccaattgttcaccaggccacatatgtgcttgaattcacatacataagcatacatatacatgcatgtgaggttaaataaaataaataaataaaattgagctcaaaatttccttttatctagtgatattgtagccataacactgaggcaagggactgcatggtacacacgtgtgtggtggtacatgtgacaacagcgtgccatctgtcacgtaacagtgaagcacacacagtcatctaaacaatgcttgagagcaaacagcaagcaactgtgtgactgacttacgcatttcctaaactgtactttgaaggattatttggagtgtacttattttcatttattaaattatttatttatttatttatttatttatttatttattttggtttttcaagacagggtttctttgggtaacagccctggctgtcctagaactagctctgtagaccaggctgacctcgaactcacagagatccacctgcttctgcctcccaagtgctgggattaaagacgtgcaccaccactgcccagcctggagtgtacttctataaaaagaggagtcacggacatctcttgtttacgacatccttgattgcattaattttgattaatttaatcctgttgttttgttagtaaggcccctggatcaatatgctctgtccacatgtgcatcctatggcctaggcttgtgatggggtaccgcacctagttgtatgaagatgctttgtatgatgttcacacaaccgaattatctgggaacaccatcctcagaacgtgactcaaccattccgtgacttgtgactgtgataacatcaagtggaatggagtatgcctatcttcttgagaccttagacttattctgaacactatgaagtgtgattagcagatgaaattaaattctttattgaagataagtcattatgtcaggcactgaggtgagacagtcatataattattatgagatagcactttggatactaatgacctgcttaagctaaaacctatgaaagttaaatgacagtatatagtgaataattaaagaagtattttctcagtaggatactacaatgatgagtgctacaccaaacatttatggaagtctagttataggaaatcactatacacaggtctcattactcctcaactcactccagattctactatgatctacttaagaaatgctacatagtcttttattgagatggtgaaaataatgccatgttattgtatcagaccacacagatagaaaatggcccactagccaataacacttggccctttagctaccactggatgctagcacagtacacaccagctcatttgtgtggagttctgttttaaataaggtaaaacgtgcatagagataagaggctatgtcttcaaagtcagaggcagtgtgtgtgtgtgtgtgtgtgtgtgtgtgtgtgtgtgtgtgtgtgtgtgtgtgttccctgtgggcacggctgccatgatacttgtgtagaggtcagaggataactttcaggagttgattcttgcttcctaccatgtgggtcccaaggatggatggaactcaggtcatcaggcatgaagacaagctcccatacccaagaagtcatctcacccacccctaagagagggtcgcttgttttttgctggtgtgtacgccagtctggctgacctgctagcttcccggattccaatgttccacctctcatcttgacatgggattagagaagcatgctgccatgtctgtctttaacacagggcctgggatacatgttcaagtcctcatgcttgtgtagtgagtgctttaccccatgagccatctcccagcccttagctccattttaggcttaagggactactctcctgttgttgacagaatcatgaaacacagggatgactgtactgaagaaaaagccaacttttatcttgtgtgccttgtgcctggtctgactgtggaggctaacatattatgagaggtaccacaggatcgaatggtggtatatgtgacacctgtctctgatcatttgtttaaattgaatttgataaggtggtagaaggtgtttaattatcgcatgtagtgggaactttcattcattcatttctttattcagcaaatactttttttttatctccttttacattcttactgctattctgggtcctaatttaacaactacaaccaacacttgtccctggagaaggaaaaacaagcaaatacaaaatgcagtagggttccttcagagcagcaagtattagagaaaaatacaaaggttagtagtgtaaagcttgttcagggatagtggggtgttacagtttaagtgacacaggcttctgtgattcccagctggtggggctattttgagagttagtggaaaccttgggaggcagggcatatctagacacagtagatcactggaggcaaggctttgagggtcacacatggcttccacctttccttgcgttctccttcctgtcctctctgagtgagaagccctctcctgcatgttcctgacatcactgcaagcccgagacagaataaacaccccccaacacacacccagttcttctcttacgttcatgggtcacagccatggaaaggtgattaaacacagagagaattttctgatcgcttgttcagggtgacctgtgcaagggactcaaatcctgagacttgactgcacagttttagtggccacctggaaggaagtgcatgacccccaaatgcccctgctacaggaggaggagaaatgagataaactggccagctgtggaggtgagatgaagagaggatctacatggatagtcagaagaatgacgtaacacagttgagattgtgctggagcacaccaggcgctgggtgcctctgggcctcccatgccagacacgtctagctaagggtgtcattggggctccaggaatcacaacaaagtctcatctttagtgtggtctttctgagaaaggccatgtcgcaccgccatcatgtcacttaattcccagttggaaatcagcatttttcatacagtctgtgtcctgtgctttctaagttgctattagtttccttaactattaggaaggtactttgggagaagaaagaaccgctgggtgtatcaaacgtcagaactcattaatattctgtcttacaccatcctgattccaagataacccttactctccttgtgtcctcacctgtcaagtgcagatgttaacagctgcctctacatgagaggaagtgccagacacaccagcctctacatgattctagcagaggtgtgtgtatgcatgtatgtgtgtgtgcaggtgtgtgtgtgtgtgtgtgtgtgtgtgtgtgtgtgtgtgtgtgtgtgtgtgtgtgtgtgtccctctaaggaggatacatggtaaggaagcagtgaagaatccccagtggtaaggggagattggactcttccacctgcctccttgactccatcacctcccctgcagttgtaagtaggggccagggttggagagagaaatcccattagcaatgtcagggttgtttattgttttcatcctaatggtaataaatcaatgctgggtttgtcattttaattagtcttcttccatcagggaagtcatggctgctaagtaccgatagggagctgaaaaatcgcctagaagcaggtccagaataagcctcatccccagcttcagagcaccggggtctgatgggcactgtgcacaggatggtatcttagggaagagctgtgcatccagacggggagggggctaggtctctttctgatgtgcaggaagaagggtggagggatcggtctctaaggacatttctatgcagttggaagccagaaagaagaaattagatacaaacatcaggggtcttctaccctcgaggtgaggacaggggaaactcagtgagacaaatctgagctgcttttccctgtggctaggctttgctcctggtcaggctcctgtgcctggagtgcttaccacaaggaatctcttgctgtgacactccagggaagattcaaaggcctttgagacagtgtggttgtacaagaatgttctggctgaacagccggggcaatagctctgtctgtaaggagcttgcctcataagcataatgatctagattcaatccccagagcccatataaaaatccaggcatggtggtgtctgcctggggaaatagagatggtcggagcctggggttggaagatggagatggtcagagcctggggttgggagatggaaacgggctgagtcctgaagtttgctccaccagccagcccttgcttgcttgcttgataagttcctggccagcaagaaacactgtctcaaaaaaagaaaaaaaaaagtgtatggcaccagaggagtgacactgaggttgacctctgacctctacacatgtgtgaatatacacattcacacagttgttttggcttaaagggggaaaacgtgaccaggagccttccaaattcaagccttacctgtagcttacgacattctctcctccagctacatccataatgacccctgacttctctgttgttgagatttgtagtaacgggatggtacatgtgtgccctctaagtgctcatcttaattcttgcatttactttgtgtctgtggagaaatcacttgcctctctgagcctcagttcctgtatacagtggaaataaatatctagtctacctgactggcataattatttgggacttcccatatgtagtagaaatagagatctagtccacttgactggcattattatttttggggtctgatggtgtgttctagatcacacaacacacattttctttcatttgtgggtccaacatggtacagacacacagagccatatatgtattgatggcatgaaaagggaagcaaaggggagttcacaagagtaggaagacaggaagaatgatggctgggatgtacagatgggaatatcacttggcgtacattatatatctgcattaaaatgacctcatgtggctctgtacaataaaaagaaaagttaaaaaaagaaaaccttttcaggtattctacctggaagaagcatgaaggtagcgttgggttatctcacaggcccagttccctcacctatgcggctccacagcagcctggcagggcgcacgttggctcccccctccttgtgtacttctgtccatccctctgcccatgggttctgagcttgctcacaggacacagcgtctgagcaaccttttccatccctgtcttcctatctggaaagtgcttccttttccctttgggaaggtatcctgaactcaatctcttccttcatccctttcactgtcttagttaattctaaaaggatcctgggtgcatgtaatcccggggatggaggtggtccataaggattccattgactccactgacagacagggtcgctgcaaccttgctctgatggctggtctgcgactgcgcagaagagggcgctcttgtgcagagctgggtctggcttcctgggaggagaagtttcctggttccagcatcctcaccgctgtgcatgtattctgcagcctcaggaggctggctgctcacccatgggcctctgatgtttggagacgatgcggccggcttttatcagcatcctccccttccagagctttaaccctggtttactcgatgaaaaccatcaaagaatgaggataaaaacagtgtcctttttcccagcgctagagaacggatttcagggttttggaaattacttaccaggaactcattttgtcaaacaatcatttatcgaaagccagtgttcagcttcttgatgttttcaggaatagaattcaagctccttccttgtgtggcccctgctacctgtctgatccagtctcctgataattttctgtactctgactctttctgcctcaggcttttatcctcatagtcccattttgctagaattatattttctggctcttttttattattattatattcttcagagctcaacataaatgtcatgttctcaaagcagattttcccaaatgtatgtcctatttagagttccacaaagaagggaaagcaagaagatatggacagcagggtagatgatagattaatagatctagatgatactgacattcattcaagatatatgcggtgtgtgtgtgtatgtgtgtgtgtgtgtgtgtgtgtgtgtgtgtgttgtgtgtgtgtgtgtgtatgtgtgtagtgctgttgttcttacaaaggctaaatcctaatgcacacggttggcaaatgtgagaccagggagagcagatagtgtgtttttggaccaactgttaatgtctagtctcatcagtattcagagattgatttcccagctgaattcaaggaggcaggcagagagagaggggagagagtgggaaaagagacagacagacatacacagaggtggggaaaggaagaagggagggagggagggagggaggaagggggactgagagagggaggatccactcactcagcctttgtgttctcttcatactgcccacggattgaatgttgacactttgtttcactttgtgatctgttagttcatgagatggcccagtggctgaaggttctcagcacagtgtggatctgagtttgcctctgtagactgacatgatgcaaggagagtttgcaactgtagactgacatgactcctataagttgtcctctgacctccacatatacaccatattagtaagagagatagactcacttgatagcatggggtatgtggtggcagggccggcacaaggcataagcaagatggatattcagccatgaagataggatgagacagaaagaccatccggagtcagggcacagctggtgccatcagctgtggaggaagaaatcatgtgtgaagtatgcacatggctagaagggagctggtagaggcactgagaagattccagaaaagcagagggcagacttggagacgacacctcttaggcaggctatataagacattggatatggggtgagaaagtgaaagatagggaagtcagggatgactctcctagaatttagaaggaggggctggaagactagtggattagaagtatttgaaagcgatcaccctctaactagaattgttccctcagctgtttcatcccagaaccctgtgatcagcccacccatgatcacatggtgaggcttttcaaccaagagggcttcagagacacagtctagttcccactcccaaacatttgccacattgaagaacagcttttcatgaaactgcatctttaaccaggttgtccccaaacttagagatctgcttgcctctgtctctagagtactgggattgaaggcttgtatcaccacactggctctaagctttctttaattccttttcgaaagttggaaacttagaagggtggggtcttgccctgaggtcaccactcccttttttccatttcttaatctgtttgtcttcatgaacacaggacttagctccattctacttcctggtgctcattttctcctgaaattgtacattttgtatttttccttactcagcttgctcctcttattatagatctgtgtaagagtgaccactagatacaggcagtcgtggtgcatgcctttaatcccagaatttgggaagcagaggcaagcctggtctacaaagtgagttccaggacagccaggactattacacagagaaaccctgtgttaaacaaacaaaaaaatgtgaccaccaataaccatacaatagagtcagtactaggctgttttgaggttgcctctgccgatagaattaatttaaacctcttcactttagcctcaggcagaatttttggacatgagcaaaaaagcagccacattattcatgaaaacatcacaagaacaacttctaggcaacacactaaaattctcctctggatcctcttgagcgagggtcacacagatcaaatcgccctcagcaccactgtcttccatgttcctctagcatggcccattaagccccacttaaagcattcaactgctttcctaatcacacttcctccaaaaggccacacctcctaatagtgccattccctatgagcttatgggagccaattacattcaaactaccacatatatattcctaaatataacctgctcggtctgtataatgctacttgtgtgtatgttttcaaggctgaccatttggtattggacaaccagtttctggggaagactatttctccctctcccagaattccttagtggcctgcggttctttgtgtaggtcttatgggctttcgattgtccagattaacttgtctattgtcctttttcatctcatgcttaggttcgcatgttggtgagacttacgggtgtagtttctcacattcctaggattcccagtctcacagaaaaccccctgatcctctggctcttaaatctttctatcctctcttcctcaatgttcctcaagtctttgtcatgggagttgtagtgtagatttatcagttgagactaggctccacagttctgaattttgattaattgtaacttcctgtaactggcttattctgttgcaaacttttttttttttttttgatgagggttgagcactacacttatctgtgggaatcaggacaaatatttagaaggtagctgggggttatgttagtctggttaagtggtggttgtagggtcttctctaagatccatgactacatcagccttgcatagttggctaggttttcaatacaaaacatgatttctctctcattgaacagatcttaagtccattttaaggagcttttggttaccaccaaggacatatagttttactctttacattgaagtcgtaactgaacaagctatgtgctttgagtgtaggtctcgacttatgaacatttagtcaggaggaggttcaatatgtcactaggatcttctagtaactgaaaattctatagactgtgtgccttctaccctccatcctggtttataaaacttcatcacagacataacagtcacttcctcttccatctgatgtccatccacaacattaagtaaagtcttcacatcaccaacaagttcaggagacagatagaaatatcgagacaaacacagttacccagggaccatctgatctgctaaatcctcagagtgttattccactctaaagcaaccacagggaggaaaaaaacaatgaggaatctagcggtggggtcaagagcaaagacttggtggtcagcttgaatcttggctttagcccccacttcaagtgctgttgtgagcataagaaagttacctgatcactctgacctctgtttcccattctgtaagatgagataaaaataccaatccaaggacaaagcaaaaatgtgtgtgtgtgtgtgtgtgtgtgtgtgtgtgtgtgtgtgtgatgctgagcataatccctatggcataggtgacgaaggccagatggtagcaattgttacagaaacatctcaaagcttcctgatctgttaacattgagaaagcacagcaaggtgaaatagttctcactgttttctttctcactctctctcttccatccctaatctttacctataggttgttagtggcctgttgcttgtaaaaccctgtactggtcacttttctcattgaccacacacctgcaagaatcaactttataggtggaggctaggcatgggagagataggaggaggagggcagtgagaactatcttgtcttcctgatctcaattgaagaatgggagggtttatttagctcacacttggcaggtgctacccagcatggcagctaagggcttagcagtgggagcctgaggcagcaggtcacattgtgactgcagtcatgaagcagaaagcactgggtgctgggcccgcccccgtgttttctctttatattctcattctcattttctctttatataggtactgggaattgaactctggtgggtcttcaggttagcaaggcaagcgctttaatctcagagccagctcttaagctctgatttaaagtatcttaaagtaaagtgaagaagtgtaatgctgtgatttggatctggaatgctcgccagaggctggtgtaatggaaacttggtacaactggtaaaagatgaaacctccaagagtcgggacctgtggggaattttggtgttctggaagtatgacttcaaaccatttccaattttctctcctttgtatcccaggcataaaatgagcagtttgctttgctgtctgactcttgacatgaggtactgcatacatgccaagggcccaaaagtcacaagacccactgggcctgcagactgaaacctcctaaaccataagtcacgataaaccttcctcctttttaagctgattgtctcagtccttttactgcagtgacagaaaaccttctaacatgcttaataccaacttttttggatgttttaatctttactagattttttaaagaaaatgctgtcttctcaccacacgactaaaaatatttgtactcttcgggaaaataaagatctaaaaagtcacttctggctttccaaaggcattatatcagcaagacagggcttatgtaataatctccacgaggcagtctatgtctctgcatcttaagtaggcttctgcaagatcaacacacgccaagcagcctgatgcagttccctttctccatgtaacatgaaaaaattagacacaaaaaccaaagagaagttgagtcttcaattatcatttcattgaaacataatatttgtgcattatgctaattctgtataccaaggatgtgatacaatcaaaccagataatccaaatttctgtctctttttaacattctctggcttatgtgacgggaattccatgttcttctggtgactttggacaagccaaggttgcttgatgttcagttgcactcctgggctaagtcctggagagagtctcctattctgactgcttttggatgctctttcttgaattttccttgtcctttcctgtgtccttcccagttataagtggtcatcattccactctgttcttctctaaggctgcttggttagtttctgccaaggagtgagagtgtgtatttacctttctgtgtctggcttgtttcagttaaaatactaagtctaactccatgcaaattgtgaatggcaggacccaaaatcattttttatggctgaataatccattgcttaagtatgccacacccttcttccccactcatagcctgaattttatgtggacttcatattttaattattgtgaatcacattgcagtaagtgtggggtgtgggtatctgtttggtgggatgatgtcttctcccttgcatgtacaccctgtagcagggtgccggatcattcagcagttccaattttacttttgggggctatttttcatactgttttttataatagcgtacaaatttgcatccccacaagccacttgctatcattttgtctttttagtgatgacacttctaactggagtgaggtgatgcctcactgcagttttgataggtatttctctgacagttagcgacgttgaggaattttcatgcacttgtttagtttcagactgggcatttatctctctgactcattttaaattgacttttgtgtatggcggtattaaaggatctaatgcaatgctcctgtgtatgtatacagtctatttccccagtaccatttattaaagaaattggcatctctgtatgcattgccatgactgtatggttctggtggtcttgtcaaaatttagtgagcagtatggatgtgggcttgttggcttatatacagtattttgtttgcttatgtgcctgttagtaccatgctgtgttagtaaccatcattctgtagtgtgttatgaagtcagatcttgtgattttacaggatgtgttagcttggtttgattttctccacagtactttaactattctggatctctgcggttccatgtgaattttaggaaattttctgtgaagagaaaaagtcatttacattttggtgggaattgcatcagatctctaggtggcctagggcagtctggttgtctgtgtcttctatttcttctatctgtgtttcataattttcgcagttgagatgctttgtttccgtggttaaaaatgtatgtttccttttgtttttcagccattgtaaactggattgctttcactttgctgtttttgcatgttaattttatatcaccccaattcacagaatttgtagagaagttctaccagtcttttcccagttgtgtatgtgtgtgtgtgagtgtggtgtgcagtgtgtgtgtgtgtgtgtgtgtgtgtgtgtgtgcatgtgtgtgtgtgtgatgcacatgtgtgtatgtttggacacgggtgtgtgcaggtgtgtgagcatgttgacaagtgtgcatgtgtgtgtgtgtgtgtgtgatgcacatgtgtgcatgtgtttggacacaggtgtgtgcaggtgtgtgagcctgttggcaagtgtgcatgtggagtctggggctgacattcagactcaccctccaaccctctccctccttattcactgcagcaggctctctcaatcaaactgtgagcgtggcagacccaaccacgcccttcatttgccaagtggcagcatgggaggggtggaggaacagaggcaggtgaaagagctgccctgaggtcacaagagcagaactgccccaacccctcgtcagttgcttctcacctggacaacacagtagagctggccctgaaggtgtgcgtgtgggagaaccgcccctgaggatgtgaaaacgggataacgggtccagcctcttgctcatcgctgctaagtgtgagctagccagagcaatgctacagagctcatcctggtagtgaggaccaggagagctagcagcctgaccaaccctgcaactgcccagacccagaaccaggattatgtgttggcccaccccaatatccacccatcagtgacctgctggaggacagcagggtgtgtgtgtgtggggcatgggggtggtcctgcagacccagggctgcaggatctctacaacacaaggcagaaacagggtgtcctagaagagtcccagtgagggtccagcgtcaatagtgtagcagaaaccaggggcctcgagccaggccagcgagtctttgcaatgaacacctgcgtataaaaatgtacggagaaaaggatttacttcgtgactcactgtgtcacgctgcagcttccatggtgagattttccctttcttcactttcccccctttttctcttaaattgtactttatatttttttgggaagaggtgggacagagaggagggatgtgaatgacacacaaaaaaataagtaacaagaaagtttaaaaaaaaagtaaattgtcatagtctacaagtgaagaggtcagaggagggaaacaaggaaggaagacgaaggaaagagtgctgaggacagacttcagaaaatggaatctaaattaaaacagagcggataaacacaaccaaagtttttagttgaaaaagattaaataagcaaaacttgcccatatcaatcaaggcaaaggataaaaagagataactaatttttaaaaagtacaatttacagtataaaacttaagataataaaaaacattttctgttcttaaaacaaaggactgaactatatttatatatttaggaatatatgtatatatacatatatgtatgtgacaacatttaatgaaaacagaggccatgaattcaagagagagcaaggaggaatacatgagagggtttggagggaggaaactgaaagggggaaattatgtcattgcatcataattgatggggaatgtactactgtgtatgtttatcttattgattattgaataaaatactgtttggccaatgagaaaacaagttagacggaactgagagtcaaagaggattctaggaaatgcagtagagaagtgctaatccagacaggaagtgacatagcaaggagactcatatttaagtgaaagagaaacaggaagggccctcttttcccctcggctcctgctccagcggcacgatgtgattcaccagcaaggagggacgccaataaggcgtccgataagataagtcccataaaatatatagatgtatggtaattgagactgagctaacaaataagaatcctagtcattggccaaacagctttgtaactaatacaagtctctctgtgtattcatttaggcctaactcgggtgggcggctggcgtaaagctcacacgtggcggtggggctcaggcggcttttggcaaaaagatttatcgtaacacataatctcaaaaataaaagaaataattaaaagtaaagaggagtaataaaataacagagaaatagaacttgaaagtcataaaatcctatttttattaaacaagatactcactatcacaaaatcattcctctaaagaacaaagcaagctattacaaatagtgctgctatgaacatggttgaacagatgtccttgttgtaggaatgtgcttcttttgggtatatgcctaagagtggaattgctggatcttgtgatagactgatttccattttcctgaggaatcgccatacagatttccaaagtggctgtacaagttggcactcccaccagcagtggaggagtgctcccctttctccacatcctctccagcataaactgtcattgatgtttttgattttagccattctgacagatgtaagatggtttgcatttccctgatggctaaggatgttgaacagtttcttaagtgtcttccagccattttagattcctctattgagacctggaaacaacctagatgcccctcaactgaagaatggatagaaaaaatgtggtacatttacacaatggagtactacacagcgtgtgggggggggggaagcaatggaatcttgaaattcaaaagcaaatggatggaactagaagaaaccattctgagcgaggtaacccagtcagaaaaagacaggcattttatgtactcagtcatatgtggattttagacatagagtaaaggattaccagcctgcaggccaggctgctggagaggctggtaaacaaggaggaccctaagagagacatacatggtcccctggagaaggggaaagggacaagatctcctgagcaaattgggagcatgaggggaggggagagggacctaggagaatgagaagggaagaagaggaggggtgaggaagacatgacggggcagggaggttgagttgggggaagaacagaagagagcaagataagagatcatataatagagggagacattataagtttaagagaaatcaggcactggggaaatgtctggagagctacaaagatgacaccagctaacaatctaagcaacagaggagaggctaccttaaatgccctcccctgataatgagattgatgactaattcacatgccaatcatatagctttcatccagcagctggtggaagtagaagcagacacccacagctaaaccttgagcttaaatccagatgcagagaaggaggactgatgaacataggggtccataccaggctggtgaaacccacagaaacagctgacctgaacaagggaaaactcttggtccccagactgatagctgggaaaccagcatgggactgatccagaccccctgaatgtgggtgtcaatgaggagaccttggaaatctatggggcctcttgtggtggatcagtacttatcgctaccataggaatggactttaggagcccattccacatggagggatactccctgagcctagacacaagggggttggcctaggccctatcccaaagaatatgacagacttttaagacccccccatagaaggcctccccctccctgggggagcagaaagggtatgggatgggtaggacattagttgggggggcagggaggaggggagggagagggacctgggattgacatgtaaaataattttctttctaataaaaaagggggaaagaaaaaagaaaaagcccctaaaagaaaggtaaaaaaaaaacaaagcaagcaagcaaaactgcacagcttccactcttcagtttataaaacctgcagaggaaaaggcccgagtctccacaagctgccatagaactcagagcatttaagaaactatgtgcattttacaggcaagttcattcatggcagtgactacagtcagaacagctgatggtccaaaataatcatagatgctatcacttaagaaaacagatgtcaaaaccaagggttaatcagaaccaagtaattaccaaacaagacatgatcatatataatcatataatcactaatttctatttttaaaagtttgttgagtaactaaagtccattatttgtccctttaaaggacagaagaatcatctcaatagattaaaatgttgtgccatgatgcacttatttgttgtaatctatcctaatttactttgaattaagatggctatgtaaatgttcatagactagacgtaacttctttacagtgagagaataattgcaagccctttatttatatttttactcagcactgcacctggaaataacaagaaaatgagatgcagctctaagaattgggagggaagggacattaatattatttttatgtgctgagaatgttttatagacaatacaacaaaatctacaaaaatttataaaaaccaataaacaagacttccaaatacaagatctatagattttaaaactatgtacattaggaatacaattatttaatgtttaggaaaagtaatatatttcccagaccagcaagcctggaggaacattcacagaaatctcacaagagatttctcagagagtaaaccaaaatcacttgcttaagaaagagaagcctaaaagagaaaaacaaagtgtatcagtgaaggacaatgtttgatatcataaaaacacaagttatctatacatgaatctatgaattcaatgtacttatgacaacgatcatgacagagttatgggcagcacttgacagaattaacttccaagtcatgtccagacagagttaagacgagggaaatttgaagagaaagaataacaaggagagatggaaacagctcaatagtaatattattccaaagccatcaaacttaaaatagagtgatgttggcataagacagatgaaaataacagtgaacttcagcaaaagccttgcaaaggcagagcggctcactctacagtgggcgcgtggcgagggaaatggagaaaaacgggctggcttgcaaagcggccctgcacttgagcttcatctgctattacatcaagtgcgtttagagatgttgtccgcacagtttactctaacttggactctgtcaatgctgcccctatggactgacactttcattcctcagcaatggcacaggctaccccttaccccagcagtgcaggggaagggcatttgcagggataaagtggaaggtggttttttccttcacctatctccttccaagccgtggtgtgctttatcaaagtgggtttgtctttcaaggatgtgtagttcaacaaacattctaagtactaaaatgcactgttgctgttttgggggacagctgaagtgtgtaccaaaaggtttgttaattgagacctgatccctgataaagtactaagtattcttaactgtggtgtttagaggtgaggccagacggggattcgacaagatcattacctagagcagtgtttctcaacctgtgggtttccacccctttagagatgaacagtccgttcacagggttgcctaagaccatattgcgtatcagatattcacattacaattcataacatcaacaaaattatagctatgaagtaacaatgaaaataatcttatggtagtggggtcaccataacatgagaaactgtattaaatggttgaagcattaggaaagatgagaaccacctagtagagtgtatatttggatacattatagaagaggaatcagaacacacacatacatttgtgtgtgtatacacatacacatagacagactgaggcacacacaaggatacacatgaccccccccccacacacacacacatttcttgcttctccaaaactatgagccaaagtcaacttttcatttacatttgtccattatgtaaggttgtgttattggtgacagaaaaaatggaccaacacagttgtccagtctcctctctattctagagaagcaatcttaaccttggagagccactgagcaaggcgtcttgggagtgagatgttcctgaggtagcccaaatctcctgagataaactagtcccatcccaagggagaaagcagcagggagatccaaggaaagcccacgaagtaagcagttgtgcgttttgtccagagggatgtaaatacgcatgtatacacatgtctttatgcacacatacatatattcatatggacacacatatctatgtacacacacatacttatgtgtgcaaagtacacacatgcacatatgtgcacatgcatccatttttgctagtgaaaatgaaaacacaaatgcttgtatttcactcactcatacagtcagagttcttctctgtgcacgcatgtgcacatgtgaagaaaaagggtggaattcactatgagagtgtgatcaacatgcaattatggagacagagccctgtaagctttttccctgcaagctggaacattgggaaatccagtggtgttgttcaaaggcccagcccaaataccaggcatccagtggggtaactcccagtaaatctgtgaaacctgcgaactagggttgtctactgcaggggtgctgatgtgagtccagagtgaaggcctgaagaagtgatggctgtctccactggagcagatgtgaattcatctttgggtcctcaatgggaaggagatgtccatctacacccgggaaagccttcttctctacttagccaatctctagcccttctctacttagtgtgaatgccatcctcctctgggaaaatcctcaaaaatgtatccataaataggctaccttgacatcatcgatcccatcatagtaacataccagctgcacatttcatacctgcacacctgctggcacatgccacacctgcacaccagctggcacatgtcccacctgcacaccttctagcacatgccacacctgcacaccagctggaacatgccacacctgcacaccagctggcacatgtcacacctgcacacctgctggaacatgccacacctgcttgatggctaatgtagattctctacttaacaaaatctgtaatcacaggttaggcaatcctctggacacacccgtgaggggtttcttgattaggtttattaactgggaatgctgaccccatgtgggcagcaccttccagcagagacccaggtggaaggcattctgagggaagcacagttttctttttgcctgctgacttttcatccctggatgattgggttcatctagcctttgcctaaggctctttatcaccatactgctatcagaaccaggttctgtagccctccaaagtggattgagtagcagtggctctccagcagtgctccagcctccagcatcaccacactgggtctcctgagacaccagacttgtgaactaaatagctaccagttttcagcctccctagttctaagacagccattagagaagtactcagacagaattgagtgaggtagtctagcccagttaaatccttttctaatatattttgttctattggttttgtttctctagagaaccctggctaatacacatacccaattacaaattacatgtatttgtaattgcatatgtatatctactctgaaactgtagaataaaaaaaatgtaaaaatgcatcctcatcttggtataagggaagattcattaggcagcataagcactcttacgtgtacacgcacgcacgcacgcacgcacacaccacatacacataaatcttaattggaaatattgacatattcgaatgctttggaattttaagcttttaaaggaacagatcaaacaacaacaacaaaaaacaaacaaacaaacaaacaaaaagacaagcttcagacagggacaaagcactcccaatgtttactctaaccacacagatctgaaatccctacagagacacaccttactgaggtgtgtgacgggcacaaacaggctatttccaaaataaaggagaataaacgatcaccacatgcacaatactgcacaaagccacaaagaaatggaagtgtgttgtgactcagtaagaaaatagtattctgtgtccctgcaattggaaaaaattaaaacccagaccaaaggctggcaaaataagagaaataaaaacatttatttggttctcttgaggatataaattcatataaatgctttggaggcaacctggtgcatgtagtaagtgggagaggtatttttaggctttttattgtggctaactcccaaaagctcgtgggagctagaaaaatgttcagagcaggaaaccaaaataagacggtgtgttcccagcattagagatgaacccaaatttcaaaacacggtgctgagtgggaacagcaagccatagaaggcaaaggctcaaggtccaaagtgaacagtgtgtttcgttcacgaacatacagaaagaggttttcaacaactcccggaagcaatctataacaaagtcaagttttcaacaactcccggaagcaatctataacaaagtcaagccggggagagagggggaaatggagaaaattcaagttttcagtttatctacttgtttgttttatcagaaaaaagaaaagttcaaaaaagaaaacgaagccagagtgacacaattttaacagctctccagtgtttctcatgcttatatcagcttactggtgatcataacatattagattgtgttctgaatttggcataaggcatgtctcaattaaaagcattacacaggatatcgatgctgatgcacatctaagaaacaaaccacacaaatgtagaggttgagagttgtttctatgtagtatgagaatggagtttaaaactggagttctgcaggccaaacttggtgatgctcgccttaaattcagaatccggagggtgaggagcagggaatttaagacagaggccagattgggttatatagcaagatgtagtgagagagaacagggaagaaaaaagaatggaaagatgaaaaggagagaggacggggggggtagagagatgagggggagggaaagaaaggggagggtggggaagaggaagaatgagggaaaggaggggagggaaaggaaaagaaaggaacgaggggaggggaggggagggagggagaggaggggagggaaggagggagggagggagggaggggaggggaaaggaggggagggaggggatgggaggggctagcagcagagctggctttgaaagccagtctaacccgaagtcccccacttggcaccaaccggtttgatccatgctttgccatcctccaagctctcagatcacctcctctggagaggagcctatgcagcacaggactccagggagatgtgctttaacaggaagcgacaccacagaaatcatctgcctaaactgtttcctccaaactccagaacagagtggaagaaggactccctctaaaagttgcttcggaggtctgaggttaaaaatacgcagatgtggggctaatacaaaactcctggctcctagctgtagcattttgttgatgaggtgtgggaggtggtcattcagaagttttcccatagatcagagtctagcctctgtgttctgtgtgcagaaagcccctcgggtgtttataagacactgcaccagatacagagaataaggaagacctctctcgtttatgatgcccctggcaacttgcttggaactgcctctttgtgcttgtgttgaccctccaggcagtctctaccctctatttgatgcattggagtgcagaatggctaagtctgagcgacttgtcctctgtagctgcctctgattagcagataggaatctgccagattcccaccaggctctttccccaggggatggtggtgatgcggattgtacagacaggctcacaaaatctgaaagacattgcggacgataggccatggaagatgctttgttctcgagccttatgtctttgttcccttctctactgctgagctgcagagagagcatatgtgaaccctcactgcacaagaaagtgggaaggaccagtaaagaactatgttggtttgaataagaatgacccctataggctcatagactgaatggttggtgtaaggatccaggcattatgctggcctgcctctgtcacctggcataatgcactcaggcagcaccttagtcagatcaggtgcaaaggcccccattaaaagaaagaccccacccacttttgatctattacgctctatcttttttgatgtttccttggggcatacagggcttttcctgtcttcctcttctgtcctctctctgtctctgtagtgtctctttacctcttttctctttcctccccctccctcccctttctaataaaactcactttagttccggctccctggcatgtttgtccctcctcctgggtcacccctgcctgccatggaatctgccaaggtccccccaagcgcattattgtaacacttggtcattagggaggagtgctacttgacagggattaggacagtggtcttattggaggaagtgtgtcactggggatgtgttctggggtttcaactgctcaagcttgcccagtgtctgtctcttcctgctgtctgctgatgggatgtagaactcttggctaccattcaagcaccatatctgctgcacgctgccatgctcctcaccatgaggataatggactaagcctctgaagctgtaagccaaccccagttaaatgttttcctttataagagttgtcatggtcatgatgtctcttcacagcaatagaacaatgactaagacaagaaacttttctcttttattgcctccacatggtctgagagctttgacaccatcatatgctaacacagtaataaaccaccaagagcccaatgcctcagggtagaatgaaacctccaaaatgtgatccaaaatagagatgtcatcttactagattaattatttcaagtgtttactatagtgatgaaaaagtggcccaaaaacgagctagagaacacctgtgtgtgtatcaaaatgattagtgttaactgttgacttgatagaatctagaatcgcctctgggcatgctggtgagagcccatcttgattacatcaattaatggagtaagactagcacctgagcagggattctggagaaagcaaactgaacatcaatttgatgagctctgctccttgagtgtggctatgatgtgaccagctatctggaactcctgactctgtgacctccctgcagtgacagattgtaacctggaactgtgagccagaataaactcgttcactccaaagttgcctttgttggggtgggtatcttatcagcacactgtcaaagaaactaagacacacacacacacacacacacacacacacacacacacacacacacacacgcacacagacacacttgtgtgtatgtataatgaacttttgcatgcatgtgtgtgcatgtttgcatgagtgtttgcatgtatgtgtgttttgtgtgtacgtttgcatgtctatagagttatgtatatcatgtgtatgaaggcgcatgggtattcaaacatgtgaagaccagactatagtttagttggtgaaccagaaactcaccagtcaagctagcaaagatggccagctagctataagggtcctgtctccacatccagagtgttgggattacaggctggccagccaactttcatgtgggtgctggagagctgaactctgtcattgacatatgtttagcaagcacttatccactgagctctctcccctttgaagagacaaggttcagaaaggcatttcacccctttctgccagggtgaaaggagcctcttggagcctccgaagtgctgtgtgttcacacggtggtgctggagctggagatattgacaaagatggtatgggaaagggtgctgactaaattctcgtgtcagaaataagctctagtggttgttctcctgaagaagtcaaggttccaaggtctcttgaatccttccttttctgatgagctctaggaacctattgtagataatatttcaaatctttccatctagaagccatgctgacccctcaaaggtgaggcctgccagataaaatttgtaagctctcatctcagccatccctccctgtccccatgaaaaggactatcagcacagactaaacagtcacatgaggatttcattcctaccttgctccatcgaagattggacatgtgtgcttgtgacatgtgttccctttcatccacctcccggtgttcactgtccccagactaacccaagcctttgttatcttttatttagatcttgtgccctcctaatggatcttctcacagttcatttcctctgccttcagtacttctcatccactgttaccagataaatcttgctaatacaggcccctgatgctaagtcatgaccctgctcaggtacctttaacaactccccaggcctacagaatgaagaaaacattctagcctgggaagtgaggccccgaggctctggacttaattgctctaagactggttttcttggggtcatattcactattctctgttttagtgtggtgaatcttagcttaagcttcctttcacctatggtgctatctactgtctacaagctgttagccctcattcaaggcataaaatgtggccatctgcacagatccttctcccaaatcctcaaactggaagtaaatacccctttgaattcctatagtattttatctttgtagcattgattgctgttttagtccctgccttctggttgtattcattcactcattcattcaaaaagtagaccctggtgataaaacattgctaaacagatagctattaaagcttgcttgctttcttggtcattttgtttcttgctcagtaatggacagggtgcccaaaattgcttggcttatatgataaaatgtgtcttcctgcaaaatcggttagtgaagcaatcttcaaagtcaagaactcaactgccttttgttcctttgtttccagaagacttttgtatttcattattactgtttcttctacctggggtcactcttccactgacaatcttctcatgtgtttgttttttccctttctttaggccccagatggagtgggaaggagacttggtacttaccattccaagggttcatgctcatgcagtttggacaggcaatacttcaaagcccacacttgccttcaccacatgtcatcaccaaacacttctgagaactaacacagctccgagcttccctaatcccgccccctttttttttaacattggctttgatccttggcaggcatcaactcacacccctaatcttgctataacaggaaagaagcagcagtgttcaggattctcttcaaagctgtgaagttgcatcatattcatatcattgagaaggctgactctctgtacagatttccaggatacttccattaaggatggttaaatttgaatgggaattaaatctgaatgggtctctggaccagcctctcacaggacagtgttttgcaattgttaatgtgattcatagcagcattgtagacatactcagtagatggactaaatacgtaaacaagtttactagaattggcaccttttttcttacacagtcataatttttaaaataaaatttttaccagctttcattattgttactcaaggctaacaaaacttgcctcagaatagttgcatagttactcagctgtaaatatttactttgtcaaagtgaaggatgtagcacattttataaagagttggatgtagacttgctgtttaccacacagggagtacaaaacataatattgatgcttccatgtcattggacctgttcctaggaagttgagtccagtgtctattcaatagcagtgcaagtgttaattttccttcctgtaagaacttttaaaagtatcaacataggcatacattgcatatttgtttttctttttgaaaaaaattaaaatcatgaaataaattaaaatatatgggcaacccctgactaatggtagcccatctttaaaatgggggctttgcagcagtgcaaaagcaacatgccgttggcagaaactgtccctgaagctgggatttgcatctacacctggctagtgctatgtagtctgacacttaggagatgctaggcagcagcagtgggccacagctccggagcagctacataccctgacaaacagccagagccacacgggaagagggaactcaaggggaggaactgcctccatcatattggccttgggaagcattttcttgatgaatgattgatgtgaggatccagccactataggcatcctcggggtgggtggtactaggttatataagaacacaaacttagcaagcaattgggagcaagtcagtaagcagaattcctccatggtctttgcttcagctcctacctccacgttcctgccttgagttccattaataatggactgtaccttgtgagctgaaataaactctttcctctgtgagttggctttggtcactgttttatcacaataaagaggaaaactaagacagcgatccttgcttgtgaagcaccatgctgccaaaggaggactgtagtttgctagttgtattcttgggggttttgatctgtattttcaaactaaaatggattcacaaagatgcagaaaaacatcttcagcagcaaaatgtgctggaaactgttttcatttcattgtaaaccatgactttcatttctgcatgactgtgttttggcccaagaatcatatatcatgaatccatacagacagctcttgtaacctgtttgtatggttcctctctagcatcaagcccaatggtaccatgaagaatatggaagcaaataacatttatcttgcctctttgggaatgctttaaaaccactctgctatttcttttgagcttcctaaacaggcaagataattcttctacaagcacttgagttataaaaggcttcaactgacaccttgttaatcaacttttattgatattcaaacatagatctgtgtaaggagtaagtaacctatgaaatgtgatttatgtcaacaaagaaattataattaagttgaaaacaattcagttgattagtcagtaatggatctcagaactgctcctagtcactgtggcctgatgtattccatgtacctatgaagaaaggaacagaaagtaattctgagagaaggatgactccggtaagccatgaaatgtttttgccaatgttgggcaccattttatccaacaaaaaagaataggagagaataaaacatcccagttcctggggctggggagatgcctcagaaggtaaagtgtttgcttgcaaactggaggacctgagaggtcagcttgacaacctaccccataatcagccactattctacagaatccaagctgggccaattcgcttttatctctagaaactgaaagccaaggctcaggtgtagaacctgtcaagttaggtgcatgagttggaagattgtgtaggtactggaactgcagaaagatcacacacacacacacacacacacacacacacacacacacacacacacacactaaaacagcacgacatcttcatttttctgagtatggtttttttcactgatcataatgatcccagttctatcaattttttgcaaacgtctcaatttcctcttccttatggttgaataaaattccattgtgaaggacctgaaagaagaaaggactgtgggaagtttttctaagtatatgcgttgtatttattcattcatttgttgtgtgtatatccataccatgcagtccacagtatacatgtgtgtgtctgaggacagcttgcagaaatcagtctgttctcccattatctgggttcagggatcaaactcaggtcattaggcttggtggcaagcatctttacccactgggccatcttgccagccagctggcctattcttttaagacagggtctcttactgaatgtgagcttgaacttttggctctcctggatggccagcaagctcccaggatctgcattagtgctggaattaaaagcacatggagctccctagagcagagggagcaccactttggatacagatctgcggcctgcaggaccaggtgagaatgaatgcatgtctatttgaagtcacactttctgtggcagccccagggaaccaacatgtgtttgggccagggaaataggttgaaaggactattctggggatggggtggggtgtggggtatgtggaaaactttacaaataagaaaacaattatcaccgcaacaactgatttgtcaaaaataacttgttaaggacacatggaagcatagctgttgagatgggaacctttggaaaactgagcatcactgtttctaggtgttcaaggaacagcctctgtagccacactgtatctttcttcttgtctcttttcactacacccaagacccatggaggtcagatgtgttaaggatgtagaggcagaagtccacctttgttaaatttgactcttctggggctggagagatggcccaacagttaggagtaccgctctcgaagaagattaaaatctgggtcccatatgacagcccacaatcatctggaactcctgttaaaggggatttgatacccttttctggcatctgtgggcacccacacacatttggtacatatgtaaacatgcatacacttgcatgtaatcattaaattaaaaaaataaaaccggttcttatgataattggccaaagagctaggtttcagtccttcttgaaaatgtaatgtctagaatcactgtgcttcagctagtgttgcttcaaaaatgaggctccttttcaggacatggatgctggagctctttggagcaataggcattcctctgtatcagcaaaggaaatacctttacatgctcacaacaccgcgatgagcaaggggcggatggtgaatatggtagaaggagatccaggtggcatgatgaaagttctttgtgccctacgagaaaatgatggcagtgtctgtttgttgttgtgtgttagagtttatgtctttcattttcagctaaagctgcacatgggaagatgggaatgacctgattaaagggttcattcaccaggaagagataaacagaagttaatccttgtctgccctgatcctccattctgaatgtgatcctgtgattgtatttcaaggactctagttcatttccaaagcagatgttacattaagtgagtttgattgcagctgtcctgagggttaggacaagaatccctcagccaccctgatggtttcccagccaagactcttcagaagtgctctttcggaaagagctcagactctagatacagcggagatctgggaacaagcctccagaagctgcaggctggggctgagcatcacatgatgccgaggggagaattttctagatttatttggtggtgtccaaataaatgttgttaattacttgtccagtatcatcttattaagtcactaatctacggaattttctgtgctaggtcctgaggcaacttgaatttgtctccctctctgcagaggcgcactctagagagaagagtctagggaatccccacacaggcccctcttgtcttccagtggcatgggggggggagtgtgtctgcttttcagcatttgtcaagcttccaggacaagtcagattgtgtggagaagagggctccctcagagctgcgtattgagtaggtctctacaatcctctcttctatttccctgccatggccagtggacacaaatggcaatctaagtgaaccataaaacacgactggaaaaattcttcagtgtgcagaaagaggcagcagggcactgagatgaatgggtgctggagctgtcagagcttgggagaggtagcacctaatatttatggcactgttgaactcccatgtgctcaagacctatgaatctggagatgtgtctcccagccatcaacttggggctctctacctgcatttgtcaaagtcatgttttcttccaagtgtggatggtgggagagagccaaacagctctgcccgggtgacattgtcagaactcctactcctacccggaaggatgcctttcatctccaaagacagagagttgcttttcatgtcatccctccctccctccttccttccctcaatcccttccttccatccttccttccccttttagagatttagttcaaaaatatttccattaattctttcagagtttcctatattgcattttgataatattcatcccctctcccatcccttcccaaggctactccccaattacatagccatccaagttttcttttttaattcaataagtcacattaatgtcttccatgtactcttgggtctgtggccatctcttagctactttttagttgctgtgctaagataccgtgactaaggcaacttataaaagaaattatgtaatttgtggctcatgattccagagggttagagtccaaggccaccaaggcaggtagcatggcagcaggaaggcagacaggcacagcactggagcagtagctaagagcttggagctggtgttttaggagttatgtgctgcttattgtggaagctgggattctatctcagatcctcatggtagagcaacaagaacggttaaccactgggtcatctctccagcctacattttcttcttttaaaatgggtcttaaatttactaattgcctaagtaagccctgcagagcttaagagcttacaggccacagaatcccaataggacttacaaccactgaagtgggctctatctcttccatgttgctaaattctacagggaaaaacaaaataagaccatattttcagaccacattctggactcatttattaaccagcagctttctggcctttggctagctgcaaatctctctgagtgaggttctcctaattattctcatctacataatgggtcggtgagtggctcttttaggtatctgtttcacaatagctgagtccttctctgtgtccaaagctgtgctccccactgctgcttgcaagtcagtgtttagtgacctggggagctctgcaaatgagctgtgaatgtgatgaagatcatggcaggagaacacagcacagggcaggaaaaggaatgagtagtctcccatttattctgaagactttgggaggcctctgaagaaacgctgtttgagctggggcaggaaatccaagtgggctatgatgcaatattgaaagccacagatgtaggggaagctgtagccacgcctacttaggggctggctacaggtgtgcctgaccacgccctcacaagctttcgagggcatagtcaggggacgtagggtgactgcgttttcgctttcggtttctcttttgggcttgcatacagactgctgccacgccagctggctaggtcgctctgtaggtaaggcttttccctattaaatacccttatatttctacctggctccgtattggtaatttcccactttatctggctgtcaggagcaggatattggaaacccacatcccatttgggacaggctgtaggttccatcaggccctcggcctaggcccggaaagcgccctctctccacaggtgctcctggctagcagccgacccactgcagctgagctgctcagaaccatcaactcagcttggagacagtttctagctgcctagagtcgaggtaggcctcggctttcagcaaaggcttcccctggccgctgctgcgggaaagtcgcatctgttttagtggttgcggccgcaaagccgtatactctctaagataagcacagccgcttttgagacctctctccaccgctgaccgactgctgccaaacgcctcggactaactgaatgcctgtgctacctgctggtcaaatatagttactgcatctggagtagaaatcaggtaaacttatggcagaatatttatcatttgctaaaattggtaatatttttgcttattacgtgaattcactgtttgaggaggatggtaatgtgccaattactggcctatatgccatattggcagttagcttgctggtacaaatagtattactagccagaggactcaggaatagggataaggataatctcaccacctatttacaggaaataacagctttacgcaatgaggttttggagaacagattaggtcagaccacaattgtgcagcaagtggaacagaaattggatgataagcttggctctgtgtccaatacactaaagacagagctgtctgatgagatgcagcatatttatgataagataaacacagagagatcctccatgtctgaggccttagaggctaggctgtcagaagaccatgaccagctaaagaatatctgtagccagctagaaactcagataggcaatgttactcatcaactagatgcaacggtgcaaaatacccagcatagggttgaagaattggacaatgccattcaatcagttattgaagcatccaaggtagcagatcagaaatttgagtctagatttgaatgtttggaagataatttacagtacagggctgacagattacataggtccatacggtcgattgctgaggactcaaaatcagcaaatcatgacctcgaatctagactccaatacctagaaggcagtttccatgccatccagatgctgcctaaggatgatcgtattaaagacatagaaaaacatgtaggtgagcagttagagcaattcacagattcactaacgtgcttggaatcttttatgattaaggagattgaaacttttcaaaaggatatcattgctaggcttaaagatcattgggatgcctcagaagcagaatcactccaatcccaggcacctactccacctaggtatcatgactattcttctaaggttgttactcgtacaccattagtgtacccagctaccatggtagaaaagccagcttctaagaaacaccctcatggatggatggcttatgaatggcaacctacacagctgaaggatcttaagaatattaaaaaatcagttgtctcatatggtctccatagcccatatgtaaaacagctattacattcatgggcaacctttaacagggtgacactcacagattggaaacgattggtagcagctgtacttgagaattcatgccaaatccagtggaaggcattagtaagggaagaggcaaagctccttgagcgtcagggcataaaggaaggttttgaagcccctctagataagcttcttggtcagggtatttatgctgacccacaggttcaggctgaatataatgatgatatactgtctctatgcaggaaagcagcattaaatgcctgggataaggttcgtgagccaggagaatgcctagaagcttataccagaatagaacagggacctacagaacagtttcaggatttcttacaaaggttaactagggcagtagaattacaggtaacagatccagaaacaagacaatcaattatatatacaatagcttatgaaaatgcaaaccctatatgcaaaagaatacttttgcctttaaagatcagatcagctccgctagaagaatgggtttgtatgcagcaaacattgactataatgtgcaagatactggagcttgggtaggagaagccatctccaaagttttaaaatggcaacaggaaattaaaaggtctagaggtgaggatgtaaaggcttggcaaggagaagcaccttacacaggtcaacatagataccaagaggctagaggttactactactatgaaccagaaccttgggtaggaagagccttcccctggagaccacgaaggctccaggaacctagatgtttcaactgtggtaaaatgggacatactaagagaaattgtagacaaatgaattctaacaatgccttctggattgtgtagaagatgtggtaagggcagacactggaccaatgaatgtagatcgaccagggacatacaaggaaaccccttaagttcgggaaaccccgagggggcctcaagaagtcccccacaatagcttatgtgtagttccccacatcgagaaaggtcgggtcattcccagtagcagtgggagacaatctctcacaggaacaatagatagttctttgcctattgtgaaaaatgatactgctctagatggtagtttgaatagtgatgaagaatcaagtgtgaatgacaaaatgagaaacgcatattttggcaagcttctattaatgataaaaggcctcagttgaaagtgaaaattaataataaagttatttctggtttagtggacactggggcagatgtaactattattactcaaaagtcttggcctcagaaatggcctcttagagaggcaaattacaatttttaggaattggaactctatctagagttcgacagagtgttaactcagtggtctgcatttgactggaaggacagaaaggaatactgaaaccatacgtggcagatatatctataaatctctggggtcatgatctcttacagcaatggaatactcagattaatattcctccagtgtcagatacaaattatgtacaatctttagatagtagaaaagatctggtaagacgctatggaaaacggttaccaaccatccatgctgtacagaaactaggtacaaatgatggaccttcagagaagccaaaggccctgccattgaagtggcttacagatgaaccagtttgggtaggacaatggcctatgacctctgagaagctagaggctttagaaaagttaatacaggaacagctagacactggacataaagaggaatctaccagtccttggaattctcctgtatgttatcaaaaagaagtcaggtaagtggagaatgatgacagacctgagagccataaataaggtaattcaaccaatgggctctctgcaacctggaatgccattaccttccttaatacctaaaggatggcctatcatagtcattgatctaaaagactgttttttcacaataccgctacaggaaaatgatagagaaaaaattgcatttactgtaccaactcttaataattcacagccagttaggagataccagtggagagttttgccacaaggaatgctaaatggccctactttgtgtcaacactttgtacagcaacctttggaaataatttgtaagaaattttcacaatctcttgtttatcattacatggatgatattcttttatcagattctaataaggaaactttggaacgtatgtttgaaatggtgaaggaagttctgcctcgttggggattacagattgccccagaaaagatacaaagaggagattctattaactatttaggttacaagatagacttacagagaatcagacctcaaaaggtacaaattaggagagattggtatcaaactcttaattctcttcagaaattattaggggaaatttctcaattacagatgattattggtgtagaaggacatgacttaaagcatttaaaaatggcccttaaaggtgataaggacctaaacagtctgagcatattatctgctgaggcagaaaaagagttacaatgggtagaaaacagaatattagatgcgcatgtagatcggatagaccttgatttacactgtattctggttatcttgccatccagagaatacccttctggaattctgatgcaaagggaagacactatattggaatggatatttctgccacataaacagaataaaaagttaaagacatatatagaaaagatttctgatttgattttaaagggtaaattaagacttcgtcagctgactggaaaagatccagcagaaattatagtacctttaaataatgaagaaatttcttccttatggaaagataatgaatattggcaaatagctcttactgactttttgggaacaattagcaacaattatcccaaaactgacagaattaaattcataaaaaagacagtctggattcttccacgtattgtaagacaaactcctatttctggagttcttaccttctacactgatgccaacaaatcaggtaaggcaggttataaagcaggtgaggtaagtaaagtagttcaaagtccatatacatctgtacagaaggcagaattatatgcaattctcatggtacttaaggattttacagaacctcttaatatagttactgattcccaatatgcagagagagtcgtgttacatattgagactgcagaatttgttcctgataatacagaattaacttctctgtttttacaattacagaaaactataagaaacagaagtaatcctatatatattacacatatcagttcccatacagatctgccaggcctactagcacaaggcaatgataagattgatcgtttattaattggaagtgtgctggaagcctcagaatttcataagaaacatcatgtaaatagcaaaggtttgaaaaaggacttccccatcacttggcaacaatccaaggagatagtgaaaaactgtcctacttgttccttttataataaaactccattgccagcaggttgtaatcctaagggcattgggagaaatgaggtttggcagatggatgtctttcactttgcagagtttggaaatttgaaatacgtgcatcatactatagacacattctcagggttccaatgggatactgctcttaactatgaaaaagctgtttctgttatcacacacctgctagaggtgatggcagttataggtatacctgcacaaataaaaactgacaatgcttcagcatatgtctctacaaaattggaacaatttttcaaatattataacataaagcatgttactggtataccacacaatcctacaggacaagcagtggttgagtgatctaatagaacacttaaggagatgctcaacaaacaagcttggaagattaaaccccccaaacataggttgcataatgctttattaacactaaactttcttaatgccaatgaaaaaggacaaacagctgcagaaagacactggactacggaaaaaaactgctgaactgaatcagccggtatacttcaaagatgtattaacctctgtatggaaaccaggacatgtgttacgttggggtaggggttttgcattggtttctacaggagaagaaaaactttggataccatcaaagttgatcaagattagagtggaaaaggaaaaacctctcgacgagggcaaatgacaggtattctactaaggtgtatttcataaactaaatagaaactccccaaaggaaagggaagtgttttgcttttatcttcacaggaaaactcatctccagaaggcaaaggacactgcatgcatagatacttaagaagaaaaggtagctataaccatcaaacaaaaggaacgtgccatatggtaaactttacagctgtctctcagagaactcaatttctctttatttcctagtccctattcagttaaagcaatgctggatttagaggtggatttggctttcctcctctaaaatccaagcacgttatttaactaaactttagtgtttctgtgttgtatcaagaagccaattgatgtaatacaaaataaaagaagaatttggggactgtctttgtcttttcttggatctttctctcaaggtgtatatcctctcataattgttatgctctcatggttgcattccccagcatgtgtacatacacaagcaaacatttctctgctaactgtttatgtttgagtccacacagccaatgaagacctgcctgtcagcaatccctggacaccctggaaagaaaatgggccacacctcctcgactgcactggatccaacttgctccatttcagctgacactctggccagaggtttgggtactgacttcaatcaagttgaggatttcaatcgagatcttcaatcaagtgaatcccatctaacatggactggatactaacattttcttcctacaggatcccacatgactatcattgtcctatttcagcaggaagtaacttggaggatgctacgccccctttccccattgttgtcacttaggatagtgtgtatacctagttaggaatagcttcctattgtttatggttgggattggaaggaggtgttcaggcttggacacctctttcagatgactttagggtttagttaaaatagatagttaggatgtgacataagcagtttgttgtatcttcttatattttacctttatgattgttaattttggatactttaaactgttaagttttaatccttttttagactaaaaggggaattgtaggggaagctgtagccacgcccacttagggtctggctacaggtgtgcctgaccacgccctcacaagcttgggagggcgtggtcaggggatgtagggtgactgcgttttcactttcggtttctcttttgggcttgcatacagactgctgccacgccggctggctaggtcgctctgtaagtaaggcttttcctattaaataaccttatatttctacctgactccgtattggtaatttcccactatacacagacatgagaacatgtgcaagaagagaagggggtgagggtagaggggagaacaaagcacgctactgaaagcttagtgccatggggatcagccaagaagtttcatttcctaaggaacatgaggacgtgtgcagatccgtaaagtagattccaccaggaataccttccactctcacacatccaccaaaccaccatggtgagatgattgggaagctcacttttgagacacaggataacaaagagacacaacaattcctattggataacaatcacattaggaatgaactcatagctacaccaatctctgatatcctggcttctagagggaccacagtgcataagcccaggaatcagctatcttggtatattaatgatgcttttctcttcggtaacccactgaccaggattttaggtgagacacaattcccagccctcctcactgaaggggtatactgaagctaggcttggtctctgccctccatctttgagagtgtagactctgagcaccatctgacagcccctgctcagtccccctccggctcttatgaattactgcagattattatacatggactttgagcatccgtagtgacgggtagaaatgaactcatctatgctcagagctgtgctggaattgtataatacagttcccagaaactatccagaaggtatttttttttttgttctttctggttttgtaatacctaaggaaagagcacagacatttggaacagggaagggcaaaccctattctttttggtaaaggttcacatagtgaatgatttagtgtttacaagacacatacggctactattgcatattccttccctgttagaactctttaagaatgcaaatacctttgtgaatttccctctatagaaactagccacagattggatttgtcctgtggactagagtctgccatcccttaatttgaagtaaggttggatctggagcatgcaacccaatctgatgagcctatttgtgtcagcattgaaaactgtcagatggcaacagtctgcctaacagaggccattaattgcatggctcatgtggaaaaatacagtctttccttggattttgcttatactctactttcaagctaataagttagcctgccacaatttcatgaatgatgtgggaattcacaaaactgtcatttatagcaaaagaataagccagaatatgcatatctgatacttgtctaacaatcacaaatcctgaaagataactcagaaggctagatgatgtctgcacacacacacacacacacacacacacacacacacactagattgcattaggttaagtatacccctaagattaggaataattcaattttaagaagccacatgcatgcttgtctttcttctggaagaaaaatatggcatttacaatcttacttaaagacatgtagaaacacaagtgatccatcgaatgttgcctttcactagacaaccagcaagcatttaaagtccagcaactttaaagaaacaaaatacttaataatggatttctggtgtaaataatcttttctaattgttctgtattatttgccaccttaagatagacctgttgtgtgatcttaggactaaaggattccatgatagcttaacatggagtttgagctccaaaagtaaagtaaaggaataaaaaagagaatggttaatttgggggatttcaggatagttaaaatttaaagtagagccaaaagtaacatctaatgggaaactaaatgagcattccctataataggcagcccagttttccttcctgtggatcccacctatgtcatacatagttaggaaggattcatgaaaagaaaaatacagggaaaggatttgatatggttcatgagtcctagaataagactgtaggattaacagatatgctagcaggtggttagatgggagatgcttgaagccaactgaacctaagagcagaaattaacatccccaaaagaaaacagtgattacacagacacacacacacacacacacacacacacacacacacacacacacacacacacacggaatactgcagcacagaaagcattgctattttcccctgtgcaaagacctgaaataaataaacttaaacagtgaaatgatttatgttggctgactgttgggggggggttagttgataactgattaggctcattatcttggaccaatagtggtacagtgcctccataaatggaggaggcagacaggatgaagaaagagactagagtccctgtaccctccttgagagagagcatgtcctctatgaactacaaagaggtaggaaggcctttttgtttgtttgtttgttttgtttttggagacagggtttctttgtagctttagagcctgtcctggaactcactgtagactaggctggcctcgaactcacagagatccacttgcctctgcctccagaatgctgggattaaagacatgcatcaccaggaaggtctggccttcctacatcttaaaggttccattacctcccagtggttgcagattgggaaacagaactttggaagacagccaacatccaaatgatgacatcatgttagtgactcctttgtccataggggatttcatcttatttcctcttccatcattactgctgggtgtgttttaagatgccccacaacacagagaatccatatggcagacattcggaagatcaatgccatttgaaactttggtcttctgttttctaacttaacatttcatattttgttgaacttagcatttcacattttgctggtacttaatcctcattcagtgagctctcttctttatcactgatcctgtatttcagaaatcccaaactcctaaaccttcattcacaaaggacctagaaacagaaacaacagaaacactcttcttaaactgcaagaaaataagagcatctagacagtaacaaaacagtgagtggggcaaaatgaaagatttcttccatacttcttatttcccaagtttataataaataatgaacataaaagaaattgtcaaatagaaatctgtctattggtaagtgtgttatagattactccatttttcttgcctcgggaagaattcctgtaattagaagagtctgaggcaatgaaagaatcaaaccacgtggcattcttgagctgagacagctggctacagacttgaccctgagtacactgccactgagactaagctactcatctgttccaagagcattattggaagaatgatttaaagtcctgatcacaaaaagtttgggactctgtctgatacatgagaactactgaaaaatcttaaaatgtttaattacatgcttcaagaatcacaatacaaagttaaaaaaaaaaaggttgtaggttaaatgttcctgaaacttccattttagacacctccagtcaggttaccttccacacagaagtcatactaccttagcatggacatctagactaaggcagctatccccactgtagtcagggctaatttgagtaaagctaaaaactctgtaggacatctactgacacacatgtgcctatgtgtctacatggaccacatgtgctcaggcatatgtacataacccccacccccgaatatgcctatatgcctgtatgaacccatgtgtgcaaaggcacacacacacacacacacacacacacacacacacacacacacacactgagaatcttctcggtccctctgagcggggcctgtctgtcttctcacacagtcatctgactcctgcctttcttccctgtatcttagggccattctcttgtttctccacagttcatcaagttccttaaaagtcaggcatgtgttccccccttcctgcagtggccacggttctacttggtagcaggcaaaccagtcttcagtccatccctgcatggtggctcgggctgcaagaggctttgctgagggcttactcagtgcccagcagtgctatggcagcttgaaaatgactcctgtccccaggaagctgcaagtacagctggagaaacaagctatctcaggaaataggctgttaagtcagttgcctcagaagatcttgaagaactaatcaagagttcaaatcccggaatctcaaagcagaggtacagagtagggaatacccaggaaggagttgattttgtggacttgtaaattctcgaaaataaaagtaagctggtgatcatttatttataatcttgggagaatggaaatgagaaataaagaaaacaagtattagagttcttggtttagtttgcttttggagaaaaggtctcattaggtagcccagactggcctccagctcagcgtcctcagggtctggggtcacaggcctgtgccaccatgttatgtccagcttttctcttatagcaacactctcgacttcttttgatggtatttgttacatgaagcagtctgggatttccattgtggttttaaatgtatagttgttaaaatcaagataaataaaatacttctgtgatgattattgtgtgccacgtgcgctcaaagatgatccgtagtccgtaaggctaagatttctttattcagataaacaccagccacagacaacccggagcgtgccaggggcagcaaggcagccagccagagagaggggccagaaagaagggctattctcgtgtgctctgggtcccttaagaattgttcccgagtcaccttggacctcccttgaccacaccctcatgggcgtgtcccagcacacctgttggggctactaggagatgggggctacagtgtctccctacacttctgtgtgtttgagtttcctagagcaaaatcataaccaattcttgagttgtgctatggtatccagctctgtgttatggtctaagcctttgggtagtcacgaagggaaaatgaggtcaacaggatggttaagaggttttctgggcatggcagactgggtgcatagttgttaaaactggctgtgtttgtgtcacttccttcttgaactcctagtgatatgggccctttaggaaatctgaccattgatgaactggggacatgagaccgcaatgttttcccattctgtcaaggatggtggcgagagcgctttgtattctgtggcagctcccctagattcatattggcatggggcttcatcagcttgcagtatagaaagacaagacaagagaagggggaaatagccgtaaatagataaataataggtagataggtgaaggatagatagatagatagatagatagatagatagatggatggatggatggatggatggatgcttgcatgaatatgtggatatatggataaagttaaagccaaacctaaagtaaagcctgttcaattgtctgcagctcccattaatttcaataaatatccaattaaatttgttgacaggcagctcatgaatcctggagaaaaatggatcactttctaagaatctggaacctttgggggcttgctgaagaattcaatctttcaatgtgttcatgtttaatattgattttaattagccagatatgccccagataatttggagaacctacaggatttgttttgccggttgcccttccttacaggaggctgacagatggttgattagaatgcacattccagcatcccaggagaagcctgctcactcctgcctcacagcattctgaataacgtacctaagggtgtaggctgcttctggttggggttagtactcagagatcggctttattactaagaccatagtgggtctacgagaaagtctaccactactcaagatcaaggaaggctgtagttgttctgccagacacctatagcagagtgtacccgagctggaaaacagagtaaggatgcagacttggttgctcctagtggattttcacattggttacttgacccttctacaacacacatgggtactttttcctccaaataccctactgtccaacataatctgccattgacgccagctaggtgaccttgaattcaactgcctatctccttggagacagcatgacaccttaccagctgaaggctgtgccccaccagaccactcctcttctgaagacaatgtcaatcacaatggtagcctgaacttctgactgaacacatagggtcctacaagcccctatattctcttatttgctagaactagggacaatagtttgctgatattttctaatttgctgttaagaataggatgtagaccaagagccagatggaggagattcataggacaaagcattgtaggagaggtgagcttccaacccctctgtagaccacctaccttttaggagtctccatcctgttcagaatcttatccaaacttgactcctttgggttcttatttcagtatgataatgtgagagtgactgactaaatcaccaacctttagcctctgatggggaaagtacttctgtgtatgtttatctcattgattgttaaataaagttctgtttggccaatgaaacagcaagctagacaggactaggagtcaaagaggattctgggaaatgtagcagagaagtggtattccaggcaggaagtgacatagcaaggagactcatatttgagcaaaggaaacgggaagtgttgcttccttttccccttcctcctccagctgcgctatgtgagccactggcaagagagggtgccagcaaaaggcatcctctataatacaagtcttataaaaaaattcaggtttatgataattaagactgaattaacagatgaaaaatcctagtcattggccaagcagcattgtacctaatacaactttctgtgtattcatttgggccctaactcgggtgggtggctggcgtaaagcacactcgtgtcgatgaggctcggtggcttttggcggaaagatttatcgtaagaagcctctgccctccttagaggttggcactggggagggctggaagttatctggggaccagcctctatcctagagttatttaggatccagcagtcaacagtgatttcattaacatggaaaacacattttgtttgtttgtttttccagacagggtttctctgtgtggctttggagcctgtcctggaacttgctctgtagacaaggctggcctgaaaatcattcttatcactttggagagccacagggttttaggaactctgtgctcagaggcagagacagaaatgttttcgttgggatttctatgcatttatgccctccctaagtggtgaatgtgttccgattagctgcagtatgcttgatttattaattatcatctcttactgctcctgtgaattgttttcttttataaaattgtaccagaaatccaagaccttaaggtgcatgaactgaatatagtcacactgttttaaacttccccatggcatccaagtataaggagcaaccaggtaaatccagtcagctttgagacctgtgtacaataagtcagccatttctcctgtacaagttagcctaactctggggcctaattcactgtctttacagaaccatttcaccagaagaacattttgctctaattatcttcatatggtcactttgacttttcaagccatttaaaaaaaaagtcagaacacaaaacaaaacacctccagtgaagaaaaccatttaatctccctgctttactccaggggatcccagaagacacaatgtttgggtaaagaaaaagaatggatatatatatatatatatatatatatatatatatatatatatatatatccctaaaaatgttgtccctttacttttaaccccagttgaaggggctgtggggcttagagtctttaaactatgtttcccagaatcctttgggtatattctaccaatgggaggcgtttgcatggggctggatagaagacatagctccacaagggctacagtggaggaggacatagatgcaggaggcttgaggctgataaagagccattggcagatgcattttcagaaagctgcctgagaccgactggctttggtgtgacaggcatctgcaatattgatttttagcatctctgtatatcgtcctaagagccccctcattgggaacatagaacccaagatactggcagccactcccagccatcttggtgattctgtgtgttcagggagcagcgcccctgtcctgtacaaagctgcctcccacttcgctgcctctcaccaatccctggtgttagggaacctgatttctgaatatttgaagtgaaattcaatgtgtcataatgtcttcgaaagacccattcagtgcctataaagtgggccacaaagatattttgtcttgcctgagtaaatgatgtagagattagcagcaaaacagtagcatgtttcttccacatggagaattaaaaacagacatgagtcttcctaaatgaggagagtagataccatgattttggctcagtatctcctttggaactgctctgatttctctgcttttcttttgttgttgcattgtttgacattgtcctaagacctccagtctgaggttattttatggtacagaataacccatgtggtgtttgttgaatgaataaattaatgcatgaatgaaagtgttaaaagtgacaaaatgtgaggtgtgtatgtggctgtgcttgtgcgtacacacacatgtgtgctgttgtgcttgcccgtgcacgcgcatgtggagggcagaaattgatgcagagtgtctttctccatttcttttttgccttttttattgtcgctccagggtttttggctatgttggctggctagaaagctaccaggattctcctgtctcttccgtccagcattaagattaaagacatgaacccccttgtcttttacatgaatgttggggacctgagctcaggacctcatgtttgaatagcaagcactttacccacttagctatctccccagcctgacaaaaacttaaaaaattctagttttgtcaagtttagtttccccttgccttttctgcatgggaaattctggagatacttaagcagccttggagactgctatggattttccctctttatagaaaaggctactgtttttccattcacttgtcttttctgctatctgcttacacatttataaaacacgtgcattaaatgccaatgatgtgataggtaaaggttataaagtggtgagtgaatcatcccctctcactcaactggccagtcagtgagctatgatgtccacagtacaacataactgagtgacaggcatttttggatccccaatagtgcttttcgctgtcaagacaataagccctatcaagctgaattaaaaaataaaggaccaggtttaacctgagcaaagcactctggggtgactctcaaggcccccagaggtgaggtgggggagggagaaggagaaatcacagggcaggtctagggagtttaaataccctgtaggcgtggtcttgaggttttggggaggagcctgaacttttggcgggctttctgagggggtcagggtttagagagggaggagtggggctgaggtgggattccaaatgaacagaggaggcaacagaatgcagctcaggaaggacccaccacccccaccccgggaatctgctctctgctgttcttgaagccagagagatcttagaaggtagcatccgtttttagatttagaaagatgatctgccggcatgaagtacttttacattctcctggggtttctgagccaccattctgaagcgacacacagcagtttttccacagccaagtgtgtgactgccctccacaagtggaagaagattgcactacgctgaatattatcaagtgattttgattttcagaaactggggagagggggagtcttctgtttcaaaatagacattgggttcttccatagggagcgcaactgccctggtttgcattgaactctgctgcatatcaaagacccgcacttcggaattgccctgctttctctgttttttgtttgtcccaatatctctatgacattattactctgtatacagattagtggttaaaaaatgtttgttgaataaaacaataatatacagatagaatttgggatctatatagtgaaccataatgcaatacaaataataaaagtttgatctgatactacacttgtgtatgagtatgtgcatatctgtgagtgtgcgtgtgtgtgtgtgtgtgtgtgtgtgtgtgtgtgtgtgtgtgtggtgtgtgtgcctatgtgtgtgcctatgtgtgtatgtggggggtaggtatgggtgtgggtgtgtgcccattatgggtgtagaaaaaagggtatccagagatcaaaaactaagtaggagtcttaacacaacagagaacgatgctcttggccggaactgaaggatgcatgaccttgggtgttttttgtttttgtttttgtttttgtttttgtttttgtttttgttcgagacagggtctctcattgaccagcaacttgccaaggaggctgggttggctgaaatctgcctgtctctgcctccggggtcctgggatcatatgcatacaccatggattctgtggacccaccagatcctcatgccttacacacagtttacccacacaggtcccctgggtgcctttctctgagctgtaagcaggctgcctctaactacagcctcatacatctgtgtactagcagtgcagccttttctgactaggaaccttggcatcaaaacctctcctgccttcttttctcagaacagagcctcaggctctaagatgttcttgttcctccagtgccccgaggttaagagttctaatttactcactgcagtgtagaaccctccctcatcacctgtgcggtttctccatctaccctgattccgtttgacatgatcaggagctgtgcgtgacagttcacgcttgcacctatctgcaaacatgttcagctctgaccagcttttgtttcaggcacccctctgccgtcagtgggattaagcagagatatgacagactttgaaggtcccttgtggagggcctcactatgcctggggaggagttgggagatggtttggggggttggtggggaacatgggaggatgggaggttgagggaatgggggggatggatatgtaaatatgagtagtaattaaagaattctttaaaaaaaaagcagagataacagcagctggtgccactttcaatgttggaaccctggctaatcataaatctgtcacgtactaactgtcatgtcaagaacagtatgaagcctcttaggtggccttcctgtgtgtgcagtacaaatagacatggacgggaggcatctcattagaatgtggtcaagatggctcaagaggagtctggcttgtgctttgtccttcttggtgggggatgctttctgcagtatacctacattctcccttggatctcctcagtgtctactgtgtggttctcagtgaacactgcatggttctcaatatattctgtgtggttcttggtgtaaactgcatggttctcaatgtatattgcgcggttctcagtgtatgctgtgtggttctcaatgtttattttgcctcattgaattgaaataggacccaaatgaaaaagacccctgttaagtctcaaaccctgggacaaatgtctgaggtgcctatttaatatatcaaagtggatctgagccccaagcactcccagcatccttcaacccctgcctgttacagggccctcctggctggctcctatatcctgtctaacatgctgaactagggaggtgttcctaggtattgtggagaagaaagtttattgtagataaaagggagagcataggcaggggcagtgacgtctaggagagtcccaagtggacatgaccaggctgagctgggccatgtggggagaaagggaggggaaaagcgaaggggaccaggtgaagctgacaagagggcagcaggcagacatgatgcctgagaaggtgccgagagtccttcatcttgacttacaggcaacaggaagtggtctgtttcactgggcatggcttgagtatatatgagacctcaaagcccaagcccacagtgacacacttcctcctacaaggcctcgcctcctaatagtaccattctctttggggggccatttcctttcaaaccaccacagctacagagtaagatcttgtccagaataaacagataaacaaacaaagcctgattctggatgcttgcaacttttcatataacatattaaaagtttaacatacattaccggatttaatatggtcatcttatgatgaataaatccttactggctccaatagagagttgagtgttaaggaagtaattagccaacccgaggttagaaagcagctgagaaagttcagtctcatgtctgattcagaaccccacactgttaacctccatgcaactgtttcctttaactacggagacttaagcagaagcaatttgcatttaaataccccggctcattagcatcagaaattggatctgctcgcacatatattatggcatttaacaaaattgaaaaccccacatgaagcgcaaagtacaggctgcatatggccatacattgttgcactttggacaaacacacccctcctgtttttcctctgttgtcacactcaacctaggagacttgtgtggcccccaaagcctgtgggcttctttcccagtagcagtaccaagcaagcaaatctgcaacagtggacagctgggtgttgtttgacactgttgagctctgatgctgtgtacctctggctgagggcccagtccctgagacacctgttccctccaggcttggatgccagtcacaactaccagtagttttacctgcacctcatggaatcactccaatagggctctctcaaccccctgtttgggctttttcactcaagcagttcacggaatacagggagatacttctatttgctggttttgtacacacacacacacacacacacacacacacacacacacacacacacacagaggatacaggctgccaagcttccttgccccctggtgtgtgtgtgaccctccagcaacctctgctgtttggcctcctggaagctctctgatgcttcctttgtgtttttatggggattacggcatgggcatagctgctaacagacaggtagggaagcccaaggcggcttgtctgttcagaatagccttggactctgggtggcatcttttcctccagtgaatagggcaagggcactggtggaatgaaagcagcactatgagacaaggcaggcagaggatttctttagtcatgccaaggcagcgggagattagggttggcttcctcgggaagggagggagttaaaatcaggactgtacaattccctagtgccaggtttctctttaagcctgtaatggctcgctctattggtgcgactcttttcttgctctcctctgctcctctctggactagatcttcctgctccctcatgttctcctctcccctcctcttcgcccctcctctttctcctccctctcccctccccccaagctcccaattggttcatgatgaccccaactaggattctaaagcaacagtggagaggctcccttaaatgcctttccctttaatgagaatgatgactgccttaaatgccatcctagagccttcatccagcggctgatggaagcagaagcagagatccacagccaagcactgagccaaactcctggaatccagtttcagagagggaggagtgatgagcaaaggggacaagaccatgctggggaaacccacagaaacagctgacctgagcaagtgggaagtcatggaccccagactgatagctggggaagctgcatagaaccaaaccaggccccctgaacatgggtgtcagctaggaggactatgggcagtctatggggcctctggcagtggaaccaggatgtatccctagtgcacaaatgaacgtcttagcctagctgcacgggggaggcctaggccctgccccaaatgacttgacagattttgatgattccccatggaaggcctcaccctccctggggagtggatgggggatgggatgggggggtcagtggggagcatgggaggttgggagagaggggaactgggattgatgtgtagaataagattgtttctaatttaaataaaatttattataaaaaattccaggactgtggtagaaaacaatacatgtatgttatgtgatcatgatgtcactataatacaatgatttttctatcactcagtatttgcagaaatggccctctcttcctagagagggccctgttccctgcttcttctcttactttctgtctccattcctcctttccccacctctggcactgggctctcgcatgctgtgaacacgttttagctcatgttgcagttagtgggatccagtcacatccagttcttcatgtggagactcaaggagtatctgagaggacccgaggacccatgggtcgctctaaaaacctttatgtaacagaaatagaggattggcccacagacccatcccagaaatcctgctgctattgagaagattccagcaaggacaattctgagaactgtaggggggggtcatgacctttcactttccctctgaacctcagagacccccaagctgagtgcatggaatctggactaggcacagactttgtgggaaacaaattccacacagattgtttttattcacgcctatgagacatagaaaccaaaacaatgaaattttgggcacctcgaggacatagcataaggagcaccacatccacccacggcttgcctttgatgcatgaacgatttaagaaaccacagcatggcttagatccatcaagactttggataattaacaatacacaggctccaatgtggcagggctgactgtcaccactgtggcaccagaaaccaggcaagcaagaaaccatggtaccacttggggtcaggggaagatgccacgtttctgagtgtcccaaggttaggcccagggtaaagtgtcagcagaagtgggttcctttgccctgtgttttctcgtgtgattttccatgtgattttagtgcattctctctccccactctctttctgtgtgtgtgtgtgtgtgtgtgtgtgtgtgtgtgtgtgtgtgtgtctgtctgtctgtctgtctgtctgtgtgtgagatgaacacttgagagacaactctgtgatgacctaggaacaagtggcacatgcaaagagtgtctgaatttcctgcaggatgtgggagatgagatagaaggatcctactggggaaatgtctgaactcactaggcaataataacttgtatggttatttctctttgatctttacaccttagcatcttctgaaaatatggtcatttttctttatatttgtgaaggggctgaaccaggaaaatagttcaggaccaaactgctggagaatcaaagagaggatctccaaacctaggtgttctggtctcccctccaccccagtgactttccatttgttactgctgcatgaaaattactgccttgaataaaattacatttccttttatcaagtaattgagcttatgtaatcgtgatttcccttgctgccctggctgttagaagtctgagtcaaatttattagtttattccactgacaatattaatctaggtggctaatgtgtttgacatattttcttctaaaatggcttagcttttctatgatttttaaactgccctttgtgttgcctttcttttgttgtagccacattaataccctctgaaagtaaatgaatatcctccttaaattagtaaaattggaaatctaggggatcaaactactgccttgtggagggtgaatgggtttgaatatttgggggaagagtggggctgagaaatcacaaatgagatggaaggtatcatacaaactgccacccccaaaatagttatcatgacttttcctgagtgagctcttgatattcaaacataataatccattttaatcaccaggaaacacttgagagaaatttggcgtggtttggagggaaaacttagtggtgatgtgcaggaaatattatccaatagtctaaaaaaaatgtcagaaacataaaccagtgtagtcagctgtctgtcagcctgacagatatacctgagctagtcaacttgtgaaaaagaaaggtttatttagaccctcagatctggaggttttggtctccagtttcagttctggggcctgaggcaaggcatttactgagggaatcaactttctgtcaagagcacaaggctcacatcatggcagcttgagaacaacaggagaggtgggaaggagctgaggccacaccctcctcaaggacacattcccaaagcctaccttccttttattaagttccactccctgaagttttgttcctccctagtagtccttctggatgggaaaaagttaaaaatacctttaacacgtgggcctggaagagacacctatacagattacaacagtcataaaatgtcaagcaactggattgtaaagtaggaagaggtcttaaagaatcagaattaagttgactgactgggtgctctcagtagtgccacaagctgtcaaccctcctcctcctccctgtggactctccagaggggcccacaagaatggcctcccaccacagtgccagacacacagctgactgctgggacccaggtgaggcacagtggcattgtttgcaattccagcacttggaagactgaggcaggaggttaaccagtctttgccacatggcaaaatcttgtcacaaaataagcaaacagcagtgataaagccagacacatgctggggacagaataaaaattggtcacccaatcggatagttaacaaaggaaagaggagacttgctgccagagacctggggaacagaggtttgagaggtttgtcccttccaacatttcccaaaaacaacagaagagggagctccagaaagattaaaaatgataaaaaaaaaaaaaaaaaaaaaaaacaaaaaaaaaaaacctctgactccagcctgaaagagaacacagacaaaaaggcaggaaaatgaacttcagagaagtttcaaagtcaaatattacccaaaattaacatcagaaaaaagggcaaaaagcaaataacatgcttctgaacaatgaaaccgaccaaaggaggtgcctccaaattagatcaacgctatcacggaatttccggaaaccagcaggggcaattaagaacagacgtcataaaaggcgctaagtcataagcagacaaagtcttcaaaatagaagaaagaaacatctttacaaaactacaaatctacatgatgtgtaagagcaaggaagcagaacaaataatgcctgagaataaatagagaagagaaagtttaaaggcataaagaagtatagagtgcaataaaactgttgcaaatattagagaaaggtaagaagaggaggagcaggtggatcaggaggactgcgaagatgaggaggaggaacagaaatgaagatgacaacagcaacagaaacctaagccacaggggctggagagctggctcaggggttagcagtgcttcctgctcctgcaggggaccagagttcagatcccagactctacattatacgcatgtaacttcagctctgtggaactggataccctcttctggactctatagataagcacacgtgagtactgttaggacatgcacctggctgaccccgccccctaacaatgggcaggcacagggaggagctatgccatcgccacctcacccacaatgcattactgcctgtgtgaggactctgcgcatgtgtgaaaccccagtgcgcatgcatagtcttccctttaaaaggcccagctttccctccccctctctgcctctctcttcgtcgtcttctcttcctctcttctgtcttactttctctgctctgccgggcctataataaactggttaatgtattctcttagtctcatgtctcatcttgtgcctcttctttctttctaatttaagcaaaaacctaacaagtacctcacatacttatcaatgtaggctacggaaagaagtcttcaaagaagaaagtgaaaacagattatgagaactttccccaaattaaaaactaagataaaaatgcatattaaaagagtgagccatgtctggggagtgttgactcagaaagactcaatctaataaagacaaggcacgttcctaccagcggtggggaactggcccatgaggaatgtcctggccatgatatggtagaagagacttagaggtttgggacagggagaaaatgaagagatgacagagagtggtgatatcctgcacaaagtagacaagaagcccctggctgagcagcgggtggctcagaggcaggggcagaaggccaagggcagacgtaaagccatcctccctgaggctggaaacaccctttccctgagccctactgaaatattttaggaaatgaacttcaattgatgaagatggctggagagacaccaagtaaaggagctgttatggacactactaaactccagcgacctggaacatgaaggttaaatggctcactccccagaacccgattagaagtcaagctggacatagtgacacacccttataatcccagcgcgggaggtaaagaccgccggacgcagcctggcctattcattagttccagggcgtgagatcccatcccatggtgaacatctcctctagaataacaggtgagttggcctctgaccagtctacgcacttgtgcatgggtacacgcgcgcgcacacacacacagtcatgtacacatgcacacacacccatacacacaaggaacatttttttttaatttatttaagggaagagacttttggcaataagggttttgaaggctttgtgtatgtgtcaaaaaaggacacataggatgtggttccacctcggaaagacatctaagacatctacaccagtccaagccgcaggctcaggaaggaggatggtgggtgccaaggcttttgggaaaaaggagactgagtactgcatatcggtggagaatgtcaattttacaaaatggggagagagagagagagagagagagagagagagagagagagagagagagagaacagtagtgagaatccacttaataccaaagaactgttctcttcaaaatggtaaatttaatagtgagtgtatttttaaaagtaattaaaagagacataagcaaagggccttttttaaaatgagggtatcaaccttatggcattttagtgaccataccttaaagaagatgattattataaacacaaaagacttgggctacatttggcagctagatgtttccatggcaaagatacagggaagggagctgggaagaggagaaggacaagtattgacacaggtggagctgataaggctagattttaaaataactcataacttacgcgtttgatttgcgtacttttctacatctctgttactttaaaataacaaggcgaaggaggaggaaatgcgcgctatgactgtgagtggaaccagatcctcacgatgggataattacagctccatgggatttgttgtattccagctgtaggtcttcattgctaaggtgaatgttgaattcttgctcgtctatttgaccttactgccattgatttgttcagctgtgcactacatcctagggctcaacaagacaatactgaagaaggattcccagttctgagtcaatggtcttccctctcctctgctctgggcagccttcatcttccttgccttctctgacctagcgtatgtggctgaggaacccagcctggtgtgtgtgtggttgaggatgagccctgttaaccctgcctgctgtgtgtggatgggaatgacccctggaaacccactcttccagatccctggttctctcatttccagatcagttgaccagtaagggtgaatattaatagagtatagggagggaagaaaaggaatcacagggtgtttcccctcaactttctctctgcttgtatgctttacatttcataaatgtaaaggcagagagatggaacagagaatcaaaaggatgacagcaaaaggaaacttaataacattgtccttagcattctcaaaaaattacagtgagtattgcagtcatatcatgataggcaattagtgtctatgtagttaatgagactcaagattctcactaagtgtggtggtttgaaagaaagtggctcccagagggagtggcactattaggaggtatggccttgttagagtagatgtggcccagttggaggaagtgtgtcactgtggaggtgggctttgaggtctcctatgctcaatctatgcccaatgacacagttcacttcctgttgcctgaagaccaaaattcttcagagttcttagctttgtctccagcactatgtctgtctgcatgccactatgtcctgccatgatgataatggattaaacctctaaactgtaagctagccccaattaaatgttttcctttataagagttgtcttggtcgtgtgtcttcacagcaatagaaaccctaagacactaagcaagaagtcaagtgtagatgagaagggaagtctgcagtgaaccttgtgatgtagagtcaaaggacagctgtaaatctgtgattacacacacacacacacacacacacacacacacacacacactcacacacacacacacacacacacactcacacacacacacacacactcacacacacacacactcacacacacacacacactcacacacacactcacacacacacacacactcacacacacacacacacactcacacacacactcacacacacacactcacacacacacacactcacacacacacacacacacacacacacacacacacacacacacacacacacacacacacagaggtagattcagaaataagtaaattatacagaagatatgtgtataattgagataatgtagacatgggttttctgttggaagaccaatagtactgcccttgcaggcctggaacagggtgaaacaacaccaacctcatcttcactcaagtgtgggaagagtaggagtgtcaagcttagatcaacatccaaagctcctcccacaggtctccaggggcccccaagggcccacctgtaggatgaactttgagatgtgaggatttaagctctgagaaggaagaagagcctgggtaagtctagtgggtggaagatgtaacagtagaccctacgtgagattgttgttttctcttttctccttctccttctccttctccttctccttcttcttcttcttccagggtttctctgtgtagcttttggaatctgttctggaactcaacctgtagaccaggctggcctcaaactcacagagatcctcctgcctctgcctctgcctcctgagtgctgggcttacaggcatgagcttccattgtctggctttgaggataacaaggtaagctatgaggatgagcagagaaagcctcaaatccagcacttgtgtcaacaagcccctctgccctgcagagaatataaccgggtataactcactcctgtgttcagaatgtcacagtggataaaaccatgtgaccaaacaaccataaatggaaaatatgttgtactaactgtttctgaaggctgggaatggagatgggtggttgatcatttactagtgtatgtaatccagggttcagtctccaacaatgaaatagctccaaaacccatctgtactgaacatgtgcatttttcttattacctgagctttgaagagcatagctacttccatagaactggcactgtcttaattatgtaggcaatctagagatggttaaagtctgcaggaggatttctacagatttcagaacataccatcattttacattaagcacatgaacattcaaggatgttggcatctgcggggttctaaagcgaacatcctgaagagaagggatgaacatacctgggaggcttggaaagaagcaagaatggatttgttttagataatcaagtacaagaaaataataccctagaaacaaaagtcacatttgccaaggaagtttcttacaaactgtcatttaataaattttgcactgtaactgaagctaagcctaagaatcattttcagttttgcttctttgaaaggcgtggacaaacttgatttttttgtatcttttcatgatgacatttccccctacccctcatacacatagcagtttctacttccttccagctcactgggcttaaacatgagtaaagaatacaaataattgcataagacaccaagatgttggtgactgacagtggatctgtaaacagcatatgtcccccagtagagcaagtcagactttgaagagtcagagatgatgtagacgactagtgaggtgtagccaatagtccactaaattgacaggctcactgtgacagctaacagcatcatattccagacggcagtgctcacaacagagaaactgaccagaaggcagacactcctcttgcacatgctgacatggggaagacggaaacagggcagaagctggctgtgccgaagctgcatcaggttcacttgctacctttaagcttctggttagtagaaatcaccagtaaatgactgaactttcattaggcaaaagacatttttctcattagaaggaagctaggtaaagacaaacactctgcctgggcaaggcagggccgggtgtgtgctcctgtgttcctttccaggccatgcttccatttgtgtgctgatagtgtgtgagaaaggaaagggttccaagaaaacaaaacaaaacattgagacaaagaagaaccagaaaagcaatgtctatccattcagaagtgctgacttttctgatgattaaaaaaaatgctgacaggaaaaaaaaatcatttatagggcatttatagggctttttgacaactggtggatttgaattgttaaaagccatcttgagatatttgtagagctaagcttaatagctacttgaactaaacattccatgtatatctcccttattaaaataccaaccatgcacactggaaaagggtgtcacagagaaaaatttacatctaaacaagccgctgacagcactttagcatgactgcatgcttctggtttctagaatgttgtctttttatgtggaaggaacatatgagctacagagtacaggtggaggtcagaggacaattggcagagtcgcttctctccttccaccatgtggataccagggattgaactcaggaagtgaggcttgcatagcaggcaccttttccccacagttccatcttgccagccctgcttctgatttttaacatgtatggtagaacaacaaaataccctaaaaatgctgtgcaagaatcagaggtaagaagaccattatatttgggctctttgatgttaaaggtagacatttgggatcatttgtgatactgctcagtagctgtccctggttccactatgagagagttttactctaccatatcattaatgctgtactgccctcaggacttactttgacgaatgaaatatcagtgaacatggccttgacagagcttgacagaaaataaatgcatccttgccatttattttcctagtccaggagactgataggacagggttgactcaagcataggcccaaataaacacagatagaacccacaggatcccatgtccagctgggcttcttgcattcactcagcctggatcagctaagcacagtgtgcctgggcactgaagagttagaaaagacatcttattgttgaaaagtcatcacggtgtgacggtttgttacatggcatcctaatatctctagcaggaagtattgctgagccattacaatttctctttgaaatgaattccttaattcaaaacagcattggcatgaatcgctacaatgtcatttcccctcttccagggttaatggccatttagcctttgatttgagctgctgaccaaactatgcatttgataaacatggcagtggctgtgtagggcagatgtttataggaattaaagtctttaagaggtagatttggaattattttaggatattttcagtcatgtaagtgagaacggccctgactaagacaatggttcaattatatgtggactttgagatataataagatttcagttggaaagcaactggggacagcagtctgtctgttgcattctgggaaacagttgagtgtcttcactctaccagtctttgcctttggagacattgctcatgcttgccttggggggttggggatgtggcaaagcgacaaaacagtaagtaggttggggactgatgagctccctgaagaccacttatcatcaattcattgtaataagagacctcatttacacaaaatgagggctgactcaattacatctcaattataacctctcccaacttagttggatttcaacatttgaggccagtgtttggagagcaaagtccatttcttctagaaagattttattaattcaatgtgggctgggagatagctgtcagtaaagagtctgttatgtgagtgtgaggtcctgagttcagtccccagaagccatgtgaaaaagatggcagtagtggcgtatgcctgtcatccaggttcctgaaaggcagagacaggcagaaccctggggctcactgagcaagaccttgtctccaaaaaccatctgaaccgtatcttgagatatgtatggcactcaaggttgacctctgccccacacacccatgcacacatgtattaacatatgaacacactaacagccaccccccatctcacaggaagcaacacacagagcccaatgtgaatgatccagtacatgaaactgcgttagatttctcacaaatgcatggagagagatccagaggacttgggaaggctgctaggtgtgtgcaggtgaccccagcacccctggtgagtttgcacataaggcggatagaaagagtcagaaggccgagttgtaagctacagatgtttgggctttgaatgagaaaacgaaatgaagggagaatgacatgactattcctaaagtatggagaagatttttatcatagatagagagagcaggcaggaggaaagcgtccagtgtgaacgtgacctgcagactaaactggaccatgagaggagagagaaggagggagagcgagagaggagccatggccacatgcggaaacacttgcacacacaagcataaataagtaagtaaataaataaataaatgtatgtcagagttaaaacacacaggtcttcaatgctggagaagataagtaagacgacttgcagctcggtatgaaatagctaagcttcacatccgaggcaggacagggctctggggagaacaaagtgggcatcagagtagcttcctgccggctcccttaagcatggcacacaacacgctgctgcctttttcctgaccacctttccagccctgtgggtagtgacacctttacacacattctggtagacagtgtgtgtaattgcaacaggctggattacgagtaaggatagcttctgagaaagcctctgcttgttctggggaggagtctgccccagggtggataagaggagactggaagacgactgacaaggccaggggctagaggcaatccttggccctccatccttagtcaatctaccccccgactctggagggcatacttggcttagcttagtcatctgttgaagataaagtccgacttcttgctccaattgttctgtaatacggattcctttccttccagagcaaaaggcaggaaaattgacatggtttagatttgaggggatgaggagagaggcccatccagaacagcaggtagggaacccattaacatctccttgggggctctcccagattatcatcttgcctgtcctgaagctccacaacccctgaaggacctattctgacagagctgccctggttagcatgtgtgagaccatgcctgtcaaggcagcatggttgtctgggtcaagtgagtgtgccagtggctcctggcaggtgatgattgcataagcattctaccagcacccaagtggaaacaatgcccagcactgctgagagaagagaacatgccaggggcagtgcggacacgaaaacacacacacacacacacacacacacacacacacacacacacacacacacacaccacagttggaaatattctccagtatattgatttttattttattttttcactctcagaagaaataggagaaaatgctccttcatctgctagacttggggtgtcctcgctaagctggggggttatttttatcactgtttatcttttattctcatttcgagtggcaagtgccttgttcgcttttctcagtgaagcgagaacagactgattggccctctgggtgtccgggaacgaaaggtcattcatccactctgcaaacacatccactgggccggagagagcccagacagcctgtgacctgaaaacacccctcctgtggtgtccatccacatgctgtcctctcaagatgggcaggcctggggactgactcccagagccatccagcatggccaggacaccggctttaaaccacacacagacagagaaaactgcaaaagtaggtttgtaaatataccaggcagagaaaactgggacaagatggaggggaaaaggttggaaagtagatggtatacagggaggggccttggttttctttctttgagagctatttttacctggaaaacaactaagtcagaagaagactggacactagggggctggagatggctcagtggataagaagacttgttgtttttatgagggccggcatttggatcttaacgcccatgctgggcagctcacaactacctgcaactctagctcaaagccatctggataccaacagaagaattctaaactaagggttcttttcaaaacattggttgaagcacccatctccccagttcacataggcatggggcggggcaccctgaaatgagtgaagagtgagcttcaccacctcatcatggtgtttccatgtccgtgaacatgtaagcatgagtgcctccactcctgtttgtgtatatggaggtcagaggtcaatatcaggttcttcctccattgttctccaccttctattttgagacagggtctctcactgaacctggatcttgctggtttggctagattggatgaccaggaagcctcaggcatcttcctgcctccacctccccaacactggtgctgggttcctagcaaggactttaactggttgggccatctcctggtccctcatgtaatatgttttagagttgtctgaccaaaaggaaattaaaaattatattccagggcaaaaggaaggacaagtgttcctcttcaaggacaagatgactcaattaacagaagtagcacttagttggggtttccctatccttccagaggactgtgggaaacaaaagaagaggtgagagatgcactaacaagcccagtgcagggtttctcacctcattacacaggaagaaccaaaaaggaacaaattcaccatgtggacagagttcccaagccacatcatgcaggaagccttgaggaggtcttaactgaatccttgggccatccttaagcagaaaaaagctggtacaagagagtaacattggactgaagtggcatagctcagaaagcatgcccctcaccccaacttccatgttcctaggagacctggcaggtcgtattttggctggttcaatcctgtcgctgagcctgtggtatagagaccagaggggtgcatctccaagggtctcctccaccaggctcctaactctgcatgaagtgcatgccaaaagacagggaaaattatagcgttgaagaaatccgtgtgaacttgtgtgaagagaggtaaaaccccaagaacaatggaattctgaaaggagaacaacatgcacactagcacaatgcaacgaaaaccaagctgagagagctgaggaggaaagggactcttttaaagacatatttagagcatgaaagagaacgagaaaaccgcagctcctttcttgggaagaacactaagattttttgtacctacttaaaatacattgaatatgcccagttgcatactgagaaacctgccagtcaccaaagagaaaaataagaggacattttctcctttccatccacattttatagggtctgatcaaaccttagttgaagtatggctaagggcttatgttacaggatgcaaatggagagacaggggagagatggaagaaagagaaaagaggtggtcagattaactagaaaaaatgacttatgaaaagggacatagctttaattcatttatttcattattcattattatgaaagccaaatctcaagctcttagttcacaagtatcttttctttctttttttttttgctgtacccaattattattatcattttattttagaaacaatcttattttacatatcaatcccccattccctggacctcccaccgaccacccccaacacacaccccacctactccccaaggatagtgaggccttccacaggggaccaggtaaagacaaatcaaacaaatattcactagagtaaataaaaaaaaaagcaagctaacagaagccatttacatctgtggattgtaacacatgccacctcagagtacccagaggttctatataaataaacactgccaagtcacagtctgtctcctccgagaatatatgacaaacaggatgtgtgttgggtagaagataacacaacatctctagggtgggagtgcagataaaccggcaagcatattagtgattgtcagctacagaactgtgtacatttagaagcagagatgtcaattagcaggacaaactaaccctctgctcctttgtgccaggctagcacacgatggcaggttacaggaatagactaatagcggacctataattgggcaaagaagacatagataactctgtgtgctggacagagctgtgaaactcacagtgaggccccagcgcatgccaatgtccagtggatgaactcaaggagttcttccatagaattggcaccttcactggagctgctggctctaccagggccacggtgagatcaaaaccagcacatggtcatggctggtgaatggtatttccattgcaggatggttacagctgatactgtcactacggaaaaaacaaacaagagctagagttcatggatttaacattttgttcacgtttttattagtgaacaaaatacacagatcagaatgatgctattttatttcacacagattaagacatttcctataatttatgtgttcttatgaatacctccccctttaaacagtgcagagactggacctttcttaatgagaaagacaggttgattaagtatgttgaactagtctaatacacggaaagaactgaggagagcccaacaggcagaactactttaggaccatgttgtttaaataattcagagggatgacatgagaaggaaaggtgtgtgttctcggtgacactgaaggagaatgggacagttgagtgcacatttcagaaaaacaatgtctaggggctgaaaacaagtgtgtttaggtactgtgtaacactctccattgctgtgtatttaggaactatggaacaccctccatgcccggggtttccaagcatattatcaactggacatcacaaacactgcaaacacaggtaatgtctcatgggatcttgcccacaattttttttggattaatgcacattaaagtagacagggatgaaggaactttgggtaaagagagtggcagaggaacctggccttccatctcctaatgaatatacgaataaccacgaaagctctttcaaataaacaggtttgattttaatgcactctgggaattaaaattcattttcacaatccttaatcaattaggataagatatgccccagcaactaataaatcccagatttccatggctgcatacagctcacactgtatgtatctgtcttcagtatagtgtcttgagaactacagccaagagcaggacacacaacatcttctgattctcttcagtcctcctatctcgcagacatgcaaacaccacacacacacacacacacacacacacacacacacacacacacgcacacactcgaatgcacacatgcacacacgagcatacacacactacacacacatggaggcacacacatgagcacccatgcacacacacacacacacacacacacacacactcgaatgcacacatgcacacacgagcatacacacactacacacacatggaggcacacacatgagcacccatgcacacacacacacacacacacacacagagagagagagagagagagagagagagagagagagagagagagagtacattgtgtactgagactcatgaaactctcctttttgaaactagtcacaggctcacttgaccacgaagtacacgaaggggaagagacaatgcattttttccatttactcataggagaaaagcaatttgtgcattaatgtgtgtattcacttatgtgaagctgtggaagcatgtggagaacagagaataacctcaggggtcatcccccaggcaccactcacctccttctggagacagtgtctcactggcctgaagctcactgaacaggctaggtgggacagggacctacctgtccttaccccagcagttgggctacaagcatgccacctcacactcctgggtgtttatgtgggttgtcaggtcttcttgcttgtgtgccagtcacttcaccaacggtctcccctggccctgagtaaacagttttaatgagcaataactgaggctgattaaattacaaatgcattcaaactttgacagagcgaaacaaaacaacttgaagtcagcatggcttcctgtgcggggatcggaactgtccctgacgtgaacgttctccgtagcccccagaggcagcttctcctctctatgcttcaatttctatagaacaagaaccgtctttctgtatctcaggattattgattcagtgccatgatacaaatgcaatttcctataacattcaacaatcataaaaatggaatgtacaataaataagtgttctcaacctcaaacctgtcccctgtgtgttgggtgcgtcttttgtgattgcttctatagcctttgagttgtcttccatgttttctaaagaagttgttcaaagtagttgtcctattccatgtcacacaggcaggcagagtcacaagactcacagatagtattctgaggacacccagagctggtattgggttcagaaacagacagtcccaggtctgagcctacagcatgacatctgtgccctcccctctctttgtttggtgctcactcccattccaatcactctacactgtattggcaaggagaacagagagtgtagttacttgggacatatatgcagagaccttttgccagtctatcagtcaaaaataactctagtgcactggcctgtccccattaggaggccacataagagagactgggcacatgatctggggggtgggggtgggggtggtgtcacaggcagccccgatgctccaggcacctgtgttctgtgcagatggctgcgttttaagtgtggcatctgggaatgggggcccagatccccttgcgcccagtcaggagacagtccctgctgcaaggactgactgtgacttggaaggtaaagtggaaagtctgagtctggaggcacaggttagggacagtgtgtagtagagacagattacagggctctgcctgccagttatgtcttcctggggggaggggctgtgtggcacagtggccacagaagagtaaaggagagtcctggcaaggtcaggagtgggtacatgtgcctacattcaacatatgcagccaacatttgccaacataaccagaaaggcctaccaaagaccctgcaaagatatcaaaggcagaatttgtattatttgtagtgacttcctgtaaggaactcatatggtcagatttttttgttttgttttgttttgagggggatgaagcataaaattatacaattaagaacaaaacaacaagatactataaaataaacacttaggaagcagaacttagatgaagtagagttcaaaagtgtatgtaaattattgagcaagttttcatggcctttcatttatattgccgcctaaactggccctcttacacaattccagtgacttccactcccatgtaaatagttcacatttaattgtgaagatacctgtgctttgggcaaaccagaattagctttgcactcctgtatttccagtcacctgtaggtgtctggtctgtggacctgtaacagtgggtgtggtttcagggacagaagtgaaaagagaggagcttgaggtgtagctttcctttgctcactctttctggtgggtcagtggatctggtaggaaaatcagggaattgctccatcagttcctgtgtaattattctccaataaacattcatttatcatttatcttgggtctagtgatataattgcaatcctcgctttcagtcaccagataagcaacagcaggaagatcacttgagcctagtagttcctggcaagcctaggcaccatgacaatatcctatctttaagaaaaaaaatcaaatctagagctaagaaggtatatcagtccatatgatgcttgcttcaaaagcatgaagcccctatctcaatagccagaacccactttaaagtgccagggctggggagggggagacaagcatatacttggggcctgatggccaagcagccttttctaattcatgagagattttgtgtcaaaaaccaagatggacagcatctgtgtaatgacactcaaaattgttctctgttctctatatgcaagtgcttacacatgcacctacacacacacacacacacacacacacacacacacacacacaccatacataccataatacatacacacatacctaccacacacatgaacattacacacacacacacacacacacacacacacacacacacacgcacacacacacaccctaaatacacccaaaagcaaaaatagattaacaccaccatccttccctcaaaacaacaagccccttttgaggaaaagttactgatcattcttttataagattaaggcatgctgaagtcttttgaaatgattagggccacacttttattattgacattctatcctttgtagtttcagatgagagccagacatcagacagcagccctgcctttggacatttagcaataaaaactaacgctgtcttagcagcgtagcagttctgaactgggttgtcaaagtggggagaccggacagcaccgcctgtggagtcctactgtgcaggacctgcatcccactcttggatagagtacaggaggcttctcacagtgcccaatctgctcacagactgaacaacaccagcttcatggagtgctccctgctcacatcttcccggaacacaccagagtgagtcgctcaccagtgtgagccactcacctgtaatgataaatctttccgccaagccgcccaagtcccaccaacacaggggcaccggaaataacacacagagtcgtatattaattacaatgctgctggccaatgactaggatttcttatctgctatctctgtcttaattatcaaccataaccattaatctatatattttataaacttaccttattgaggacaccggcagcaagtgtcttgtcttcccaggctcacatggcgactctcctctaatacatttcccagaaaccgcctcgactcttagtcccacctatcatgctttcctagtggccaacagtgctttattcatcaactaataagacaaacgtatacacagaagggtctcccatcactcacccactccagaccaggtggcaaatgtgatttctcatttaactgctcgaattctggaattcgtctcatcaaattggctcctgtagaagagtttctccttcatcatgaaaatgggaagcaggaagggtccagtgttttctcaaggacagactaaaatcctaatgtctctaggagcatcccaaatgattaaagggtcaaggctaacaaaggctgacaggaaggagacagggcaagcttgcctgggataggagaaatggacagctctcatccaaacaaatgggtctacccgcccctctcccctgttcagaaaaagcttcaggtgaaaggtccctgagatagggcaaatggattattctgatcaaagtaactaactgctttgtcaaagagtttaatgcagctgtcggtgtggacatgggggttactgtgttgaaattctgttgacagtgagtgttcacaaggtgaacatcttattataggccacctagagggctggacgtgagacccttcctttcctggccctatttttagagaactcatgtgatccatggctcttgcacctgtcagcagcaggctcagccagcggccaccaccagccggtctgtgctgttactgtacttgtgggcacatgaggacacccaggttggggctagggctgtgtgaaggtcactgtggcctgtggccttcagacaaagatacatagctgcttgctcttgcccagcagctcagactcaaaccctgacttcccatgggagtagctacaactgttcagcaggaagggaaagggttttccagtttgttctacaaaacaaaaaggctagcaatgaatgaataaatgtacacacacgtgtgtgtacacgtgtgtacactacatgtggaaggtttaaaatgatatataaacctgacagttacaggctagactggggaggagtagggaaggtcagagaaaccctggaacttttaccccctgagcctaggtggtgcctatatttttaacagctagaatgcttccttgtcacttgtgaaagtctttttttgtttgtttgtttggttggttggtttttctaagctcttggtgccaaatttgctcttaattattgttttaaggagagagaaaaaaggaagaggaagagaaggataaagaagagagtgaggaagatgagggccaagaaaaagagaatgacaaggggaaggaaggagggaaagaagcagggaaggaaggaaaaagaaaggggtgaagggaagggcagaaggaaggaaggaagaaagaaggaagagagggagggaaaggaagagaaggttgcaatgacaagagtcaagttgatactatgagtgtgtggagtcgttagaaacacatggattaattctcaaaaccttcaagaatggttgtatttcagcagaattcatttataatatttgtttgcttacatcatctcataaatggcattgtattaatactacagtatgtagaagagcacaaagaagaaaactgtattaccagtaaatcatccctttccctaaatcaactaatattgaagctctcctttgtccccctttcagttgctcacacacacccccttttttacagaaagcaacgaacagcataggaaagagtgtggaggtaaccccacgcacatgcatgcatacacacatgcacatacacagacatacacacatgcatttgcacacttgtacacacacacacacacacacacacacacacacacacacacaagaaagagggccattgatgcctgcacctctgactctggagcttctcttgaaggctttgtacacacacacacacacacacacacacaagaaagaggaccactgatgccttcacctctggagcttctcttgaaggctttgccaggggaagggggttgcaatctgggtaccagttggttttgagatcccttctcacacagattctgtaggagttgatctgaaagcagcaagaggctcacggggaaaatggtcagaggggcagtcatcacttgctgagagctaatgtactcgtaatgtgctgcaaagtcagcctgcatttccttcacacaccatccccacctcgcagataggatgattttttccatgaggtttatttgagggaactgggaacggaacccagacccttgtgcatactaagcacacatttcaccactgttcaccctccgcccctgctctgtccattttgcaaaggaggaaacaaggcatagagaagtgagggagcttcctcaaggttgcacagcttagcctgaggcaggtgattggccacataacccaggctcttagctgtgaacacatgggcatataaggaaacggaggttatcccgtgcaccttccccacaccaagaaactgtgctaccctagttcagagatcatccaggcactctctgaggtttgcagaagggtggtaccagcagaaattagaccacttctccagagataatgaacagatagctgcccatcccctgccttgatcccattccagagatactgtgctatatggtccagcatgaggagatctatttgtcttgccgagagtgggaacgctgtcccaagttgccactagggtagtccatttaaggttctatgaacaaaagctctgacttcaggacagctagctgtgtgccagggaggggttcataatcttcccatcctgagtcatctcagtcagaaccaaccatccataggatgccctgtctcagagatgtgtctgtggatgttagcctctatacatttttccatgttttttttttttctatattgcttgtgatgttcgtgcagctgcttcagaactaaatatgcaatcagggtgatgcaatcagatgccttccttatcatggaagggagaaaatgccaactcaaatttgatgcaattttcaaatgctctatgatacaaaatgataagttcacttaattgacgtgatcttaattggagtcacaggggaaactaaaaggcacactgagtagggttgtttgtgtttttaatagcactgtttgcctgagattggaccattatctccctctgattcccaaaatgatgaagagtttgtattgctgaaagtttaatgagaaggcaatgccatgatacagcactttttctggcttttttctgatgtgcttttgttcttagaatatttggattttatgggctacgtatattgaggatgggccactaggaaaagtactttagacaactgtgttcacctctcagtgattagaaacacaaggataatcattcatgtccattgctaccaactggtgacattctctcttttattaaaactcattcaatcaattaatacctattgagcccaagacatcttcttgaaaatgttataagcatagaaggacctatgaacatcactaaatccctgctccaatcacaccaaagagaaactacaaaaccacatgtaagatcctgggatagatcagaaggcatccttggacaaggactggtcaacagatttaaagcctaaggctgaattttaccaaaggatggaggtatggtgaccacagtaggggctatagagacatagctctgcctttaatatgtcttctcaagttcattcaactgaacaacttttatgtgtttcattcatttttcatagctgacattctttttttttaaagtttgtatttcaagagcttctcttaaaaagaagaatcagagccaggctttgtggcttgtcactgtgatccgaacactctggaggctgagtcaaggggctttggtgtgggctcaaggcaagcttaggctacatagtgagctggagaccagcttggattatagaataagagtctgcatcaaagataaaataaggggagaaggagaaaagaaacaaaaaggatgcgtcaggcagcatattatcagtaagtacacaatgttgtatgtttccatggagagcaccttctataaagcaccgtgtcacatcttaagaatgatggtgttactttgtgtaaagtaatgagaatcaattcattagaagtatttagctgtgaaatatgcccagttaactcattctggctggttaagatatagactggggtattaaccaaattgatttaacatttgataagagctcttcagtgaatttttgggctggccaaccacaaataatatcacccattaggaagtctgaaaatatctaagacaagtaattacttttccaagtggaacagggaagcataggtaaccccattgtggtatcatagtgtttcttaacttcttttgggatagccatgaacactagttagctgtgttcaatgctatggaagtcttgagcaaagacatgtagctatgttcaatgttatggaagtcataaagatatgtatgatgggggatgtccttctctatgctgtgaatatatttttctcttattggtcaatgaataaagctgtttcactcaatggacaagcagtatagccaggcaggaagtataggcagggctaccagactagaagaattctggaaagatgaacctggagagagagagtagtgagggggacaccatgtagctaccaggaagataggatggaccgtcattctccagtaagccaatacaacacagagatacatagattaatagaaatgggttaataattaagagagagatagccaataagaagtcctagttaccgaccaaacagtttataattaatataagcctctgtgtgtttatttgggacaaaagggatgtgggaccaggcaagacagaaacttccattcacacatgtagctatgttcaatgctatggaagtcataaacaaagacatttagttatgttcagtgctatggaagttataaacaaagacatgaccataacattcatgatagaagacatctctgccttataggaacagtgggtagaacaggaaatttgttctggttttagttttttttgatcactttgatcacttcatccaaaatctagaggagatgtacacatggttcctcatctctaaaatctgaactctactagaaatacaaaataagacatgactgacacaggttttctttgaatccatcagtaaggtagttatgaagggagattctagcttttgatagaaagtcaggccagatttacaattccaatttacaatttacaattctctactactttacctctgtgacagtgggctgtccacttcctgtgcctgtaattgccttttctaagaaacagtctggggtctgtggtgggagggagcatctttagcacacaggctatgcagttctcacagtgtctctcgttctcacttcccatagctctacaatagtcagggttcccttggggagctggggagacggctcagggagcaaagtgcttgttgcatggacacgaagaagacctgagtgcagctgcctagaatacacataaaaactgggcctcacagtgagtctgtacaatcccagtgttcagtacatggagaaatgtggatgcctgggcctctcactgtccagccaccctggcctgatcaatgagttctggagaaaagagaaggactctgtggacagcatcctaaagaacagcatttgaggtgacttctggtctttacagacttgtgcaaacacatgtgcatatatgaacacacacacacacacacacacacacacacacacacacacacacacacacacagagagagagagagagagagagagagagagagagagagagagaagttcaattatgaatgtcaccagatcttcagtttccttgaagttggataaatacacttactttctgtagtagaaaaaaataagacgaagacatccatttttacaatgctgagtgaacttttcacaacacaatttagattttgaagccctgtgacgctgaaactagccaggactgttgaatgctccagctgtagaccttctcgtagctacagtcatctgctgtggaggcaggactttcttgtttctattttgttttgtatttctcaaactacagggcttccagtgtctttgaagacagtttgcttctagaacctgagctgccatgttccacagccttttcttctctgaggtccacctggtcatagaggaacaggaagatgaagcagagccttgtgagtgcccttcagcccctcaaagtggcacgggtccaaagccctgcacttcctcccgtggaactccagtcatgaacagctcaagttctgataggaacttcttcacctcatgctacaatcagcacttgtctgcttcctgcgttcagtacgagatccaccaggacagaggatgttccttatctttcttcaaatctctggtattgataattatgcctgggtagcaattgttccctacaaaaatggaagaagcaaggagggaaagaaggaagaagggagagtggagaaaatgaaaggcaggaggaaaggataactactgttttgctttatcaggaaccagtaaattcccaagcacctgggcaaagtagctactgggtgcataatgcctgccccggagtcatgcaggggacactcagggactggacacagctggagactgagttggataagggggggaacagtgctcatgttcatcctaatacctgaatttatccaaacacactaattcctctcgcttcacactgaatacaatgtctccttagctattgtgtatttgaagtttgcattaatgaatcacagactgttattttctttgacttatggtgattataaatttaagttcaggaaccttaatttccacatcttttatctctcagcatagactgggaattatttattaacagaactttattcttcgaataaatagctgataggttccagtgagtggattttccagggaagttaacactgaacatgagttttagtggagaatttaagttgacactgtcagtccaccaggctctctgtccactaggctgtcagatcagtcctgatgccagcaggtactacctatgtggatggcacccactgagaatagagtttagcttttttgcatggagatcctacctccttagtcacacttcccagcagtgagtatggtcaacgtcttcctaaaatcacaccttagggaggaggagagactgaattcaaggcctttgcttctctgcctcaggcaccatactctattctattgcactcatgaggaccaagaccactcctcagggtccagtgacctcaggggggccacagcactggtttagattattactctgtaccaaggtcagaacagtggacccttaggctcactttggtgtcaaatgatggcaaatatattaacaattccatccattctcttgtagtgagagattgcttaaatagataacagcacagcaacagcaaaatctccacaaactagagctagaaagcaatttctgacacattgtttgctataaagatgttctactgaagtcacacttaataattaaacactaatattttctcataaaattataaacgaagggtatttgctctcatctctgtttaatagtgcaatggagatgagctatttgtctgtgtatgtgaaagaaaagtttaatgaatttcctttgtgcaaagactctgatctctccaaatttatcatatttcagtaatgactggccctgaactgctaaaataattatggagtctgcaggttgaaatttctgtgtttgtagtggatgaacctgagtgataggaacataaagattcatcatattaaattattcatttgtctaagtttgaaaattttcataacaataagctaacaaaagaagtaatcaacacactgtaagaaaatgatttaaaaatacctatctggtatgtagctcatagtcaatgtttctggagaactctcaaaattctgtagaaaaatgtaagcaaactgggatgctcagtctccattgtcagtgcccctggatatagagtcacctagaaggaacatatctgcacaacccatgactttgtttccaaagaggtttaagaggaaataagcgttatagatatacatatcataatcttatcctatgagctagagtcctgggatcaaataaacaaagattagaaagcacactgagaactaacatgcatccctctaatttctgagtgtggatatgccatggccaactgccttgagaccctaccaccatggctttcccaccatggtgacctgtatcctcaaactgtgagccacaacggaccctcccttccttaactttcctttgtcacaatgagaaaagtgactaataaactataagacagtaaaatatttgaagcagcaattcatagggaacataaagataggaaatgagtacgtggaaagatggctgagattgtttggcatgagagaaattcaaaataaatcagtgagatattgctgtaccccctaggccactgcctctctgacataccatgtgagggaatgtgatttggtacaacatctttggaaaacagttgttttacccaaaagttaaacattcaatagaatttttttgcttttaatgtctgcctaaatgaaatattcatattcatacacctcggactggtactctcaaacattcaacattcatagtagctttatctgagataacttcataccggaaaaaaccatgtgacagtaatgggcatgttcattatcttaatcgtgttgttggtcttgtagccatatgttggaacttattaaactgcatagtttaaataagtgaggtttaccatatgtccatgacaagtcaacagaacacatgcaattattcccatgactcatccaaataatttattagtggattccagaataccttggttaacccccccaactgttattactttaatggcccttacttgagctactacttaactcaaaatgaatcaatacctatgttagttacttctcattgctgtgataaacaccaagaaatttcttaaggaaagagcttttcttgactgatggttccattagagttcataatggtgggagaggatggcaatggatagggaggctgagtgatggcaacccaatcatacagaggaaacagagttccagagctcagagacagggacatggaaagcagtgaggctataaaccttcaaatcccactctcaatgatgttgtaaatttcaaaagcagctcaagagaaaaagatgccatgtgacagagctcacatggagagtttttcttattaggggaaaggaaatgggaaaaggaggagggatgggggggggacaatgtcctctggagacaggagcagtagaagagaaaagagaggcagagagagagagagtgagagagagagagagagagagagagagagagtgttgtaacttaagaaaagcagagttcgagaaagatgccatgtgatagggttcaagcagaggggatttttattaggtgaaaaggaccataaaaaggggaaagaggaggggagaccagcctctggggacaggagcagcaggagagaggaaagaggggagaaagagagagagggccagagagagagggaaggaacatgggaagtaggcagggcccttttaaaaggggaacatggtgaatatgcacaggtggtgctcttagtggcagcagctgagggcatgtcctgtcagaacaccaatgacaggccagtgcagatgcctgaatactaacaacttctccaaatggtgccaccaattggtgaccaaatgttgaaatatcagagtctacaacttttactctatgtgatacccaagaaatatgactacatttccaaaaggtttgaagggggagtcaagaaactactcaagtatttacctatttacctcagctgagcccttttgggatgcttatgattaaaagataaatagtatttgggatccatatatgattattacaaatacagtatgatgaatgaatgtaaaagataatgatgaaatatgtattaagaactgggttagcccgccatatcaggtcaggagactttctggtatggtggaatctatgtgagaattagtggaatcagccagtcaactattaattagtcagagggacattctatgcaaagtaaacaatcagatgcaagaggagaattttgagaagttaagagattagcgcaattaggagtgaaagattagtgatgggggggagcaccatgagcaaaagagattggagcaggaaagaccatgtgagtgtaagaagtttgtgatggctgggcattgatggcgcacaactttagtcccagcacttgggaggcagaggcaggtggatctctgtgagttcgaggccagcctggtctccagagcgagtgccaggataggctccaaagctatacagagaaaccctgtctcaaaaaaccaaaaaaagagaaaataaaaaaaaagaaatttgtaatggaacagaacctatgagaaagaactgagtcttcaacaagactgaagatggaagaccagtggacggaagctcagttaggggaataaaaccatcaccaaattaaacgctattaaaggctataacccggaaccacagtagcaaaagtgaggctagagttacaatagctagtcatcatctctcttcccaggaggtggaggctaaacaattgcaagtttaagaccagctcaagagaccttgcctcaaaaatcaaagagctggaaatgtaggttaaccatagaatgcttgcccagcacgcaaagaccctgggttcatcccagaaccacaaaaaagaaaatgtgtgtcttggtttctgtgaaagaaactgagtcaaggaattgaagtagaggctggtcctgtgcagttctgaatgcctcgaggtgcctatggggctacaggagaagatgagatagagggaaatggtcttaatctcctctctgtatttcccttcaaatatcagaacctgtagaaggcacagaaatccttgtgctcagaggtaactctaggggaacctgggctgtttgcatagagggtcgttcctttaaaggaaggaaaataaaacctgttatctgtctggaagtctgggagcagatgtgtttaacagtgtggtggacttggtgctatcttgtgatcagagactacactggacccttcccgggaccgtgatcataagcttacaaaaagactcaatcaagaatagaatctatctttatggaaggagtcacatgtactttgctaagagttttgatgtggtcacatctgatctttaacatggggttgagttaattatcatcaggaaagttttcaccaacttgtgctgtgcttcaatatgcctaaagtaaaccaccgggatcaggttcctgaagttcaaaccaatactggctgattagtcatgttgaactgaactttcttcttgtctcgctgctggctgtggaggacacagagcccccctcacaaggagcctggtgaaaacaaaaactacagtattgattgcttgctgctctggacatttaagacataaaaatgtgtattactgatcctcttcattttgctgtaaacttgaaatcttcccaaattttaacaagctggacagaggtgtagtaacacacatgtaccaagtcaccatattgtaacttaaccaaaacttggataaattaatatgccatcctgttaagacagtgactgacataaaaaagtgagaaggaatttgaatgctttcaccaaaaagaaatgatgaatgtttgaggagaccgatatatttcatatgatgtaaacattatattctacatacaaaatctagccattatatgttacccaatcactatgtatgatttttacatgttcaagtaccagttaaaaatcgaatttaatttaccaacaaaaggaaattaagttagtggcaacaggtgtacctgatagggtgtgagagggacagaggagtgacaactttcctccatgtcttttgcatgtgttgagtttggaagcatgttcatttttctgcatgtttttattacatttagagtgtgtgtgtgtgtgtgtgtgtgtgtgtgtgtgtgtgtgtgtgtgtgtgtgtgtgtgttatagagaaactttcagttgctaggaggctaaatatgagaacacaggacagccagttatcagagctagctctagacttctgttaactatagccatgcagaaatgctctactaatgaaggactttagaattaacaaagaaataactaagaagaaaaacaatcctctcaccctaagaacagggagacctgacttaaaacctaaccaaggtcacaatgacccaagcccctggaatttcttagctggcagatataactcccttacaaggccacaagacaacctaactgaataccaagaattcctagagggccaccctgccctagggtcatgaagatagaaacagactatcccactgagccaggagaccatccggccccaaagataagagatctccaaaggatctgtgactctggtcacgtacccaaacccctaaaatcctatggttttttctcttataaaaggagcctgctttagaggaacagggcttcttctttgtctgtcggactgggaagcccgtttgcgcaaacgtcccataataaacttacctcttgttttttgcatcagctggactggacattgagtgtttttggggggatcgtccaatttgtagagactcctcggtccgagggtctttcatttggaggtcccaccgagaccaggacaccccccagactcaatttcacagccagttggaggtaagacagtctatgtatttgtgtgtatgtgtctctgtgtctctgtgtctttgtgtcttgtaaggagttttggttcggcccagacgagagtctgagggccatttggaggagggagaagagacgaagtctcatttctctggggaagcggccgccccagactttgcttccctcccgctttgtaacttgttttttggttgattagcttttggttcggcccagacgagagtctgagggccatttggaggagggagaagagacgaagtctcatttctctggggaagcggccgccccggactttgcttccctcccgctttgtaagcttttggttcggcccagacgagagtctgagggccatttggaggagggagaagagacgaagtctcatttctctggggaagcggccgccccggacttggcctccctcccgctttgtaacttgtttggcgccaactgtctaccgcggtccgtcctgtctgttgtatttcgttccactgtgcttgttattcgtgtcaatctctgcttctccccatgggtcagcaactaactacccccttaagtttgactttaggtcactggcaggatgttttgagccgagcacgcaaggaatcagtagagatccggaagaaaaagtggcggactctctgtttctcggaatggcctgctctcaatacaggctggccgagagacggtacctttgacctcactactatcttacaggtcaaaactcgtgttttccagccaggaccttggggctaccccgaccaggtaccctatattgtcacctgggagagcctgagccgtgatcctcctccctgggtcaggcccttcctcccaccccgtctttcgggcccctgcccgacacctctgcctttgcctgctccacttatccctactccttctgcacccccttcgacttcttccctgctccccttgacagagccccgatctcccaaccctaggcccaaagcccctgccgtcttgcccaatacacaggaggatctcctcctcctggactcccctcctccttaccctaatgctgagcaggcagcatcccagctcccagcagctgaccagagccccccaccaccgagctctactaccggagaccctggggacccgtcgccaccgtccacccgacttcgatctcgaagagacaaaacactggaggggcctgacagctctggaatctcccaggcttttcccctccggtcgatgggggaggggcgttaccaatactggcctttctcctctgcggacctttataattggaaggcacataacccccccttttcacaggacccccaggccttgacaggtcttattgaatctatcctcatcacccaccagcccacctgggatgattgtcaacagttattaggaattctcctcacaaccgaggagagacaacgggtactcctagaagcccggaagaacgtcccggggccagatggcagacccacccagctcccaaatgaaatagatgaagtctttcccttgatcagaccgacagactgggacatcaacacagcagccggtagggagcgtcaccgtctttatcgccagactctgttggcgggtctcaaaggggcaggaaggcgccccacaaatttggccaaggtacgtgcggtagttcagggcttggaagagacccccgcagggtttctagagcgtttgatggaagcctacagaatgtatacaccctttgacccccaggctcaggatagggaagcagatataatcatgtcattcattggacaatcggcgcctgacatacgcacaaagctacagcgccttgaggggctacaggggtacacccttcgagacttagtaaaggaagcagaaaagattttcaataagagagagactcccgaagaaaaggaagaaagattacgaaagttacaggaggacagggagaatgtaagagacaaaaagcaaaaccaagagctagctaaaattttggccactgtagttcaaggatcagaacatagaccaggtcagacagggaacctgggagacaaaaggagaacaagagtggagagaaaccagtgtgcttattgcaaggaaaaaggacattgggtcaaacattgcccgaagaatccaaggcggaagcccacccccattctccctctggaaaagggagattaggacagtcagggccaggtgcctccccctgagccccgggtaactcttaacgtcggggggcaaccagtaactttcttggtagacacgggagctcagcactcagtcctgactcagacccagggacccctgagcacccggacagcctgggtccagggtgccaccggaggaaagctacatcgatggacaactgaacgtaaggtccacctgagcactggacacgtgactcactccttcttgctggtgcccgaatgtccttaccccttattagggagagacctcctctctaaagtgggagcccacattcacttccatcagaagggtgccaccatcacaggagaggggggacaacccctccaggtactgaccttaaggctcgaggatgaatatagacttctagaggatcccttacccccctcgccaaccatggagtctagctggttagaaaaatatccccaagcctgggcagaaacagcaggcatggggttggcaaaaaaacagcctcctttaattatcaacctcaagccctcagccactccagcggccattaaacaatatcctttgagccaagaggcccgggaaggaatcaggccacacattaataaactattacaacaaggcatccttagtccctgtcacagcccttggaataccccccttctccccataaagaaaccaggtacgggagagtacaggcccgttcaagaccttcgggaggtcaaccggagaactgaggacatccatccgacagtgcccaatccttataacttgctgagcatgttgcctccgagccacatctggtacacggtgctagatcttaaggatgcattcttttgcctcagactgagtccccagagccagcccatgttcgcgtttgaatggaaggacccggagactgggttttctggccagctcacttggacacggctcccccaggggttcaaaaactctccaactctcttcgatgaggccttacaccaagacctagcagacttccggatccataaccctaacctgatcctgcttcaatacgtagatgacctcctcctggcagcggaatctgaaaaagactgcctccaaggtaccggggccttactgcaaaagctgggggaattggggtacagagcttcagcaaagaaagctcaactttgcagggaacaggtcacctacttaggataccggctccagggtggccagagatggctaacagagagccgtaagcaagctatagccctgattccagcacccaagagctcccgggaagttcgggaattcctgggcagcgcagggttctgccgtctctggatcccaggtttcgcggagctggcagccccactgtatcctctgactaaggctaacacccctttttcatggacagagaagcatcagaaggcctttgatggcatcaaaaaggccttactgtctgcccctgcactaagcctccccaacataaacaagcctttcaccctttatgtggacgaaaaggctgggatggcaaaaggggtcttaacacaacagctcggaccctggaaaagacctgtagcatacttctctaagaaattggacaatgtggccatgggctggcccccctgcctccggatggtggctgctgtggcggttctgaccaaggacgcggacagattgactctgggtcagcaactcacagtgatagccccacatgcgattgaggcagtggtccgacaaccccccgatcgatggctttcgaatgcacgaatgacacattaccaggctctgctcctcaacccagacagactgcgattcggggcagcaacatccttaaacccagccaccctccttccggatgcggatgccgaaactgctctgccccatgactgccgcctaatcctggccgagacctgcggagcccgagaagacctgatggatcaaccactacaaggagccgagcatacctggttcacagacgggagcagttttctgcaagacggtatacgaaaggcaggggcggcggtggtggacgggcagactacaatatgggccagtgccttgccgccaggaacctcagcccagagagcagagctgattgctctgacccaagcactcaaaatggctgaaggtcgtagagtcaatatctatacagacagccgctatgccttcgctacagcccatgtacatggagaaatttatcggagacggggacttttaacttcagcaggaaaagacattaaaaataagactgagatcctagagctcttgcaggctctttttctgccacgaagattgagcattatacactgccccggacaccagaagggaaatgacccagtggctagagggaaccgaatggccgatgaagaggccagaaaagcagccttggggccacaagtcctctccctaaagacctctgatccaacctcatgccaaggattcgaatacacggacagcgacttagaaacagttcaaaatctgggggccaactatgatcaggaggcaaacgtctggcgctaccaaggaaaaattctgttgccacagggggctgctaaggaacttttgtcacaactacatcgatggacccacctcgggcacaaaaagctaaaagcccttctacaacgagaagaacaaacctactatatccacaacctcaatgctctcatccaacagatcactagcacctgtaccccctgtgcaaaggtgaatacaggacggttcaagttgcctgagggaaccagggtaagaggagaacgtccagggaccaactgggaagtggatttcaccgaaatcagacccggtagctttgggaataggtacctcctggtttttatagacaccttttcaggatggactgaggcttttcctactaagcatgagaccgcccaggtggtggtcaagaagattcttgaagagatctttccgaggttcggactgcctaaggtaatagggtccgacaacggacctgcctttgtctcccaggtaagtcagatggtggccaaaacattggggatcaattggaaattacattgtgcatatcgcccccaaagttcaggtcaggtagaacgggcaaaccgaacaattaaagagaccctgaccaaattagccttagagactggcgctaaggactgggtacagctcctgcccatggccctatttagggttcggaataccccctcggtacatgggctcacaccttttgagattttgttcggaggacccccacctattatggatgtgttccctgctgatcctaaccactccgttaaccccccatcccttcaggcccgactacgagcactccagattattcaaaaccagatctggaaaccattggctgcagtgtaccaggccggaaaccctgctgtacctcaccccttccagattggggactccgtatacatcagacgccaccagtctaagactcttgagcctcgctggaaaggcccctacaccgtgcttctgaccacccccacggcactaaaggtggacgggatcgcagcatgggtccacgcctcacatgccaagaaggccaacaccagcgagaattgggtgacgaacgagaccccaaaatggaaactacagcgcactcaaaacccactcaagataagacttttacgcgatgtttaatcatttcactatgctcgatgcttttccatttctcagccctagttaaaggagccccacatgccccccagcagctaacttggcaggtgatatcccagacagaggaggtcgtctggtcagtcactagccttcagccacccggtacctggtggcctacactcacccctgatttttgccatttagccgcaggtctagaaacctgggatatcctgactataggagcagatgagatgacaacctacaggggtagaggaaaccgccgatttggctgtagtaataagataacccagtgtgagctagccagacttgatttctatgtatgtccccgggaggggcagccccggggctctgggtgcgggggatatactgagtatttctgtgctaagtggggttgcgaaactaccggggatgcttattggaaacccagctcctcctgggatctgataactgtcaagcggaactactcacaacccctccaatgtagtccccatagttttggggactgggagcaaacttgcaaaggaactctttgcctccctttaagaattaacttcactaaccgagggaaggcaacctatacggcctggctaaccgggaaaacttggggtttaagatggcacatgacaggaacagatagaggagtcatattcaaggtccggttgctgatacagagccctactccacggacgatagggcctaatccagtccttagaaacctaggaaccccaaagctcccccaacctagagctctggctcgggccattaccccggttccaaccgccaccagccattccctcgccactgcctcccaagtagaaaatattccatctactagacagcgaatttttaatctggtcaggggagccttctctgcccttaaccaaaccaggccagagatgactaacccttgctggctatgccttgcttctacacccccctactatgaaggcatagccaccctagggacgtttaatagcaccactgattcatctcagtgtgattggggagcacaccatagactaactcttactcaagtctcaggaatgggtacctgcctagggcctgttccccagtctcaccaagacctttgtaaccataccctcccacagcctgtgaaacccacctacctgatacctagtccaggcctatggtgggcctgcaatactgggctcaccccttgcatacatacaggagccctcaaccaaaccaaagacttctgtgtgctggtccaactgatgccccgtgtattgtaccatccagcgggctatctggaggacatgtatggttctcatcggacccgatatcgaagggagccagtatccataaccctagctgttctgttagggattggggtcaccgcagggattggtacagggaccacggccctggtccaaggaccgcaacagtacagcgagctcaaaaatgccatgacggcagatttaaaggaattagaaaagtcaataaccaggctggaggaatcactggcctccctggcagaggtagccctccaaaaccggagaggactagacctattgtttctaaaagaaggaggactctgcgttgccctcagagaggaatgctgcttctatgtaaaccactcaggagtaattagggactccatgacaaaactcagagagagattagctaaaagacagagggaggccgaagctcaacaaggatggttcgaaggatggttcaataagaccccatggttgactaccctaatttccaccctggtaggacccctgttcattctcctcttactcctgacacttggcccttgtctcctcactaggctcctacagtttatacgtgaaaggttatccatcactcaagccctcgtcctaactcaacagtaccacgctgtgccaagcgctgaggtccctgatgtttcttctaacctaaatctgtgagttttttttaggactcaagaacgcatttaagtatcagccactgactacagcctgctcctaaggaccatgaggcccagactataaaccagtcgtgctgctgcggacactcccgactcttcaaccagctgcctctccactgcctaaatccccttttcttttgactaacatttcattttttagacccctaacgacgccccaaagtcagcaggaagtagtatgagacagacgccgcccatttacctggtcaaaatgctatataaaattgtccactaataacccaagaatgggttacctaaaaaaaaaaaaaaaaagggggaaatgaaggactttagaattaacaaagaaataactaagaagaaaaacaatcctctcaccctaagaacagggagacctgacttaaaacctaaccaaggtcacaatgacccaagcccctggaatttcttagctggcagatataactcccttacaaggccacaagacaacctaactgaataccaagaattcctagagggccaccctgccctagggtcatgaagatagaaacagactatcccactgagccaggagaccatccggccccaaagataagagatctccaaaggatctgtgactctggtcacgtacccaaacccctaaaatcctatggttttttctcttataaaaggagcctgctttagaggaacagggcttcttctttgtctgtcggactgggaagcccgtttgcgcaaacgtcccataataaacttacctcttgttttttgcatcagctggactggacattgagtgtttttggggggatcgtccaatttgtagagactcctcggtccgagggtctttcactaagtttctggatgctttctgaggacattcttcctgaggctgtgcactcactagactgcaggcaacttactcacatcgctgtctctgattcctccacgggagagtgcagacaacgtgttgtgaggattgaaggtgttctattatcctcgtcctaaggaaacagtaagaagttaatacctgttgatggttaatcttgattgtcaatcccttgggattaagaatcaccatggagacaatcctctgggcaagtctacaagggcatttctagaatgattatctgagcagggaagacaccctgcatgtgggcagcataatcccatgggatgggcctttggctgaatgaaaactggagcatagccattcagtggtgatgcacagccgggcgttggtgttgcatgcctttcatccaagcacttaagaggcagaggcaggcagatctctgagttcaagtccagcctggtgtatagagtgagctccaggacaactaggactatacagagaaactctgtctcaacactcccaacccccactccccaaaaagctaggaagagtaagctgagcaccagggtttatcctccatttcctgactgcagatgccatgtgaccagctgcctcaggctcctgccaccatgctttctccaccatgatggactgttctatcaagccgtgagcttgagcaaacccttccttccctccttaaactgctttggtcacatgttttgtcacagcaagtaaccaatgctcacatttagttattgtctgaaagctctttcatggagccctgggaatgatgggattttccctttgcggaatattcttctacacagtgtgaagatgtgtcactgtgattggtttaagaaagagctgaacgaccaatgctgggcaggaagaagttaggtgggacttgtgtgaacagagaggtcttggggaagatgcaggagtagagacaaaagacatgagccacatggcagcatgaagttgagtagaaatgggttaatttaagttatacgagctagttagaaacaagcctaagctataggctgagctttcatcgttaataataagtctacatgtcgttttttgtgagctggtggcccacataaaaatctggttacagtattctgcaatgccgtctgtcaccacggtcattcacctgatcttctctctctctcatagcccttcagctgacaaagccacactaagaataaatacattaattaaggcattgaaccctcaccactgtctagatgcattcaacagaaatgcacatatgaacccaactctgaaaagacaatcttaaaatgcatgaaggggaattgcccagattaatagtgaatgaggtttttctgtccaacaaggctgtaggtggtgaatggtggatttttgagccccagaagaccctttaagtcccaaatatctatctcacctcctgaaaagcctgtggtttgaatgacaatgacccctataggctcatatgtttgagtgtttggtctccagttggtgtaattgtttgggaagtattgggaggtgtgcccttgttggaataggtgagtcactgggtgggtgggggctttggaggtttcaaaaacccaagccatctccaattaatttttttctgcctcctacttgcagatgaggatgtaagctctcaactgctgctccagcatcacacctgcctccagctatcatgctccatatcatgatcttcacggacccaccctctggaactgtaggctctaataaactctttattctcttagttgccttggtgatggtgcctcttcactatagtagaaaagtaactaagaaagcctgttgttagatgctttattgaggagattgattttagttgagttaatacaagacatgttacaagggacatgatcactgcctccaaattgcatagatccttgtcctagctggaactttccacaagatccttaatttttattaacaggtaaataaccaaggcctaactcatacacttagtacaggtgtgtttgttcagggctcaaatctactcttagtattatccccttgtacattccacaaagaattaattaagaactgcactatgctaacaattatggtaggtgctgaaaattttgcaaaaattgattataagctatttgtagaaaacaaggagtaaacagaattaaaaacacagaaactgtcctatgtccaatgaggggagaagatgagaagaaagagatggggtttggctgcataaaaggcatccctgagaattggaactttgatccaaagcctgaataaggaaaagaagtcagttcctaaggaggaggaggagagggcttctgggtgcagtgggcagactgtgtggagtcccgcagggtgcacaacacccctcgttggcttcagcaggtaaaaacatgtgggtagctggcaaggaaggtacaggtcagattacagatggtctaacaagacatgatgggagtttcagtatgattttatgggccccatgatgtcactgaatattctttgataggactgtgttttaatattgccagacatattccctgcctgccaaataaaattgtattgggacaaggacaagacaggatgcaggaaagccaaactttcagagggtctggctgctgcatgccctgtgctgcacagaccaccagggcagtgatctggttgagtctcatgggcaaaatgcatccctctgtacttcagggaaccggtccaaagtctcgtggattccagggcttagatcactgacgttccattgggctcagggggagaacatactttggctgttggataatatcttaggactggttccatgtggctctgatctagttggatggggacctaagcttgtctagctgacatcatctggacagcctctttggcattcaaaggctgaatcatcccacttctatactttattatgaataagatttttctctcctattgtcacttaagaaagcaattctaagattcaaaccttcacaggacaggttgctgagtggctaaggtgagggaatgctaatactcaaaatctttacacattgagattttctgtatgtcaatcctttgagcgggttgttatggtttgcttgtttgttttgaataaaggtgagagggtgttacgaataacaccagaccattaaccagcttgattttaattttcattgggaccccttgggggttgcatggcagttttgatgtattgcatatctgttagttccttttctatctctttttagccacaagagtttctataccttctccttggcgcatgcatatggtactgcttagtgtcttcatttcaggctttaggatggtgtcggagaccacaggataaggaagggtcgagcattgttctctgtaagtcatgatgtcaactaatgtgttccagttgggctggagaattagatgctgaggtggtatatccatttgaatctgaaatgtcccaccacaggctcatgtttgtgtgtgcatgtgtgagcatgtgtgagcttacatacatgtgtttgtgctggtgcaaggatgtgggatcacatgtgcacatgtgtgagcaagcatatagagaccaaaggacagcctcggatgccatttatcccgtattatctgcctttagtctgtctgtgtatctatctacgtatctatctatctatctatctacctacctacctacctacctacctacctactttaagacaggatctctcactggcccagaatgtgccaagtaggcaacgatgactgattagagagccccaggactctgcctgttcctgtatccttagtggtaggattacagcatgtgccaccacacctggctcttttgtgtgggttctagattgctattatttcaacacttgaagtagaaaagggatggtgtgggcagaggaggaaacagagaagaagtaaggaaatggaagagagaagggagagagagatgagacacagcgagggggtaggtgaaaaataagggagagagagagagagagagagagagagagagagagagagagagagaattggtagaacacttggcagggacactttgctcctgggaagataaattatgaaaacaattgacttacccaggctactgggtaagtcagtaacagatcatgggcttagcatgctaacctgaggctaattcccatgtccacatgtctgccccaggcacacacagattcatgtaaacaaccagtcaaatggacaaagacaactttcaaattacatttaaacattattaaacatgctaggggcattgaacaacattgactgtagatcacttggagctgtgagacattggggatatcttgaataaccactaagcagggaattggctcaataattcaaagtattttaacacaagacaacattttgagttattaaggcaaacaactcactatgttcactgactttctaaaggaaggaaatgaaaaagccatgtaagtggcatactgtttctggagaaaataaaccatatatgggcattaaaaaacctgagccttggaaggttattactcagtattattatagttatcttttgggaggtaagattatgggtatttctctctctctctcaatctctctctctcaatctctctctctctctctctctctctctctctctctctctctcctttaataaggaaaagtggtaaaatttaattaaattccaagaaaagaaatttaaagcactaagaaatgaacactggaaaaatacaaagcaaaattaaatggccattatctctggttagagtaatcctgtttcatttttatttgccttttacttacatgttcttctaacttttaataataccatattactttaataataagaaaaccccataaaagtctgtcaactttcagtgaaatgtgtgtgatggcatgggagaaattggaagattatacactgcaaactccaagagcagttatttatgctttctaaagcattcgtgagcttttacagagtgtataacatgtctctaaggaaaggaagaaaatattattttaaaaatatcttttgcccatcaaaacaagagacagccgtctccaaatgttcctttgaagagttcatggaatggctgagtgaactgtaaagatgagaacaatacttggttttactgaggaaaacagcaagcaatatagttatcagaactctaggacaacagcaagcactacacacatcagaacactagcaacactttcactctaagcatcacacctggactctctagtcacttctacctctaaaactgtagtaccatttactttttaagtacatgcacgcgaacacacacacacaccagattgcatcaaaaccacagctttatgcactgctaaaattgagcacgtgcggtttggcgagactgctccgtgtttaggggcactggctgcttttcagagatcctgagtttgagtcccagtacccatatttggcacctcacaatggcctgtaccttcagctccagaggatcctatgcatcttctggcctctgtaggccggctgctgcactcatgtgcagggttacactttgctggacgctgcacaggtccatgttcatggatctcagcaatgtctaatccatggagctctgtccttttcttcttatccatatgcagttcaagtaccacatatggactaagatgacaacatgagtcccaagaataaacatttggagcaaaatgaatcattgctagagtcctttatggccacatttggagttggtgagcattgcagtggtcgaagactctgaagaaatcataattctagtgctacatcatacaataactggtttgctataaattgtcaccaagtagggcccgacttaataaagttgagaactcagcagcacctcttgtggtgtgccagcatatggaacactctcctgcttggttacttgattccagttacttgtcaggcagttacagctgcctctcacacaggacatgtgcagaagagcagagcatttggccttgaccttttgactcccaggtccatcggcttcacctcacatgaactgactgaagagcaccaccagcaaggagctgtctgaaatctgtaaaacatctcccaggttgtggaaatgtacagctgatgtgatccacatttcttctccttaacattctttcagatggaggctgcagagagtcgtgacgaatggctgtcgtcattggatacacgcctattgacgggctgcagtgggctgatggggctctgacgtcattacagagcggtgttagccgcttttctgttgccctaataaacatctcgacagaaagcaagttagaaaagaatgcactcattttggctcgtggtttcaatggagatacagtgtctcttggaggggaagtccagacagagagagtgtgaggccagcctggcagtcaggggccgagttctcatacttcatccacacacaggaagcagagaaagggagaacaggaagtagagtcccgctcttagtcttcattgccaccccaagtgaagtacttcccccagcaagactccacctccaaaaggttcaataatcttcccaaacagagccactggctggggattgggtgttcaagttcatgagcctgtgtgggtcagttctcacttaaaccacaacaaaagaattcgcgttgtttggagatctcaaaaatgcctgagagaaactggaggccgagagcagcaaactgtgaccaggaagggatcaggaatgagcaacaccgttggggacaactgggataggcttgtaagaagagaggggaacggctgagtggatctgatgccccaaggataaggaagtcacagaagcttgagctaagtttaagttacgctgtgcccacacagagcccacatgccacagctgggcagtaacttgagagacaagtatattcatacaattaatttccttggcaccctaaaccacctactatctacaagctcttaggagcttaaattaccccagggctagggtgataatgtgagtccccagaacaagcaaagcccattttagggcaagaagagtgagccatccatcatcggaggccattatggccataggccacattcccttacaggagtgagcccagcctacatttgcacccaggaaggaaacctgcccttcctctgctggggaagaggaaacaagaaaattccgatccacatggtgacattgttgactaatctcttggataaggtttcagccattctcagatatataaatgagtctagtgtaggtgtctggggtaacatacatgcagagtgcagagtgactgcatctgtttccagaagaaaaatatcttaaaaccttacaacttgaaaaaaagaataaagaaaaagcaatgttgttccttttttgcaaaggcatagtggggaggggagctgcatgtaaaatgattttgatttgttaattaaaaaaaaaaaacaaccaagattttaaaattagagaaagactagtgcatgggaaggcaacttgtatttcatctgctcatgctggccagactacagtgactgtgagatatgttagatggatagtttgggcttcgagaaacagaggtctccataatagactgctaatagctactatctagttcacttctgtaaatggccctccttcacatgtctgggcacatacagtctgggcacatacatgtctgggcacatacatgtcttggcacatacatgtctgggcacatatatgccacgacacacttttctcactgaggtgccttctcatccccacccctgtcattttaatcataagtagagcagtcatagttcacgttctgctctgcttccttgtctgcattgctttctcatctctcaggtcagttttttttttttttttttttttccctgagattgaaggcaatgccaactgggaagtagagcgcggtgtcacttccttcgttgttgctgtgataaaacaccaggatcaagcaacttagggaattgaaacgttgattttaacttataattccagagagatggagtccatcttttcagggaagcaagggcaggagcagagagctggctcatcacattttcatcatgcacagcaagtgtggtaggggagagaacaggaagttgcttcttcaggtgaagttccacctcctggaagttccattacctcctcaagcagtaccactaactcgggaccgagtattcaaatacatggggcagctctcattcaaaccactgcaggaaccactgaaaacttactttcacaaaataaaacttgccaaaaacaaatcattcaatagactgaacagagagttctcaaaaaaaaaaaaaaaaaagaaagaaagaaagaaaatgaccagacaagttttttttttttgttttgtttttttatgctcatcattcttagctactgtgcaaatgcaaatgaaaatcactttgagggctcatctcattccactgagaacagctatcaccaagaaaagaaatgacaacaaacgcaggtggggatgtacagaaagaaagctcctattcactgttggtaggagtataaacttagatagccagtgtgcatttatgcaggaagccaagggtttcagaatatctaaagccacctgaagagcaaggtgtgagaatcagtctccttgatattgagacccatgaagtggtcgcaatagttatgattaatatggtagaggggccagaaagacggctcagcgggttaatgccaaggctaacatgaccttattccattcctggatagcatatggtggaaagaaaaccaactctctggaattgtcttctgaccaccatatacatgaaatagcatgcacacacacacacacacacacacacacagagagagagcgagagagagagagagagagagagagagagacagagacagagacagagacagagagaaagacagagtgacacaatagatgtaaacctaatcattgctcagttgattttgtttgtttgtttgtttgtttgtgtttgtttccagacagggtttctttgtgtaactgccatagatatcctggaactttctctgtagatcaggctggtctcaaactcacagagatctacctgcctctgcttcccaagtgctgggaaaacatctttcatgcatgatgatttctcggtgtgaatgtaatgatgtctagtaatattctgccatactcgtaaattgatgcctagctcattgtcatcagagaggattcatccagcaactcatggaaacagatgcagagagccacagccaaacattaggctgagctcagggaatcctgctgaagagagggaggaaggattgtaggagccagaggggtcaaggacaccacaagaaaacccacagaatcgattaacctgggctcacaggagcttagagagtgtgatctgacaaccaaggagcctgcatgggactgacctataccttctgcatatatatggcagttgtacagtttggtttacttgtggcactcctaacagtggaaggaggggctatctctgactctttggctggctttggggaccctgttcctcatactgggtcaccttgcccagctttaatccaaggggaggtgcttaggccctctgtaacttgatatgtcatgtcttgggagccctgccttgttctgaatagaaatggaggaggaaaggatgggggggatggaggggacagtggagggggttttgaggagatgaaggaggggaaactgtgataaggttgaattatttaaaaatataaaaagaaagcaaaagcaaaaggtaattttcccatcccctgatttgagtgagttgcttgcactcagtgaaaataaaagactgactggccctgggatgttttatcactctttcgttatttctatacacaacacaccctctattgcagcctcacgggcagacaccttatgatgccactcctgcacacgggaatggcagctgcccaggtatttgacaacttggtcctcagcatccctacttgctttgtgagccccatgaagcgaacaggttgttctttctgagtcacaggctgatgtcactcactgcctaatcccacactttccctctgactcaagggtcaccttgtggagcatcaaggtgccttgtaaacttggctctcattctatgctcctttcccattcagtcaatggtcctggttcctatgcccacacacactagcttaaaacaaagacagtggcttcaagggaagtagggcaaagtaggtgcaagcagtgacatttttcctgtctggttgttacacattttcttgggcttaggttttttgtttttgtttttgttttgaaaaattagggtcagcctatctggctgtctgggaacacttattgagacttagattggattttgtttgtacttctagataactttgtcaagggtcaccacctttacatagttcccctcccaccttggtttttgtttactgctgtgagtgacaggctagctgacccatgaaattctggggattctcctgcctccacctcccgtcttgttctgggagtatgggaactaaagatacacaccactggatctgattttatgtggctctaagggactcaaagatcagaaaagcaaagcagctagctactagctcttattcagacagaaaggctatcctggctccaccaaacctcagactgctgcctctcctcagtgtggctggagaatcctgagacttcaatgtcttcctgtcctcaatatgactggagaatgaatgccagctctgagaccctgctccagactcaaatatctccctaattctgagattaaaggcgtgtgatcccaggtgctgagattaaaggcatgagctctgttactcttcactcttgtgtaggtggtggccttgaactaatagaatctgtctacttcttaatcctgagtcctgggattaaaggtgtgtaccatcactgtatgatctctatagcttaaggctaattttgctttctgaatccccaggcaagctttaataaatcataaataatatatcaccacaaaggggggtgctgtttgtcataagctagtaacttctggggtaatccttcaagggttccagatttccatagttaattcagactctgattcctgcctgaaaagccagaagcttcaacccacagccctgaggtactgagtgccagtgaaacattcaaacccctttcctgtgggagtttcctcccggaagtatttgccttaatcttgccttgccagcggtgcactttagcagactttcaaatgaccatacttaattaggatttacatttgcaaatgggcagcagtattttccttgcttcatgaggattttctttggatcaaaacagaattcatataaaaatcactttacagaatgtaaagtcctgagcaaacaccagcgcttggcagccatagtgtgctcatgagttcattgtttacacaaggatctccaagaaagacctcaagatacaaagatcccagctttggacactagaagaatcgtctttcaatgatttcaccgctcctgtccgctgtcaccactcagacctgtgaaaagtattaacactgggccaggggaccagctaatggccagaatggttatgaggacaaacagattacatcatcctagctaaagttcttgaatgtggttaggagaccctgcaacagccttgaggaaacgattttgggctagcacaggttctgctggtctcatcctggttaactgttgcctgactctgcgctccccgtctttcccgatgcccaggcagccccttgctcacctcaagggggcagatttttaaattttacttgaattaacacccaaagaattaggtttcaagatggcacattttttcaagcaaattttaattttgttctttctcctctgtctactctttcagccccttcccctcctttgtgcccttccagcccctgtagtgttgttgggttttttctctttttattcttttggctcttttgggggccctccacccagtttccaaataaatcacacagagtcttagtcttacttatgaatgcctggccttagcttggcttgtttctagcccactttcttaccttaaagtatcccctctttcttttgcctctgggcttttatctgtctgtctctatgcatctccttctttccttcttactccatggcttgccatgtagctgggtggctggctgctggagtcctcctccttctcttgctcatagatctctcctatttattctctctgcctgccagccccgcccatttttcctactgcctagttattggatattcagctctttattagaccactcaggtgttttagacaggcaaagtaacacagtttcacagagtttaacaaatacaacataaaagaatgcaacacatctttgcatcattaaaacaaatgttccacagcatagacgaatgtaacacgtcttcaactaatattccacaacacctctgtcccattttcataccaagtgtccctttgccctctcccttttcagtatcccttgttctgatctcatggtctccttcctagatccacagtctctatccttttctgcaatcctgtgtttacatctatacaaatactaaaagttaggacccacatatgagagaacccgtgggtttcatatttcttcatttgggtcacctgatttagtactattttgcattgctgaaaacatgcctgcttggggactttggaactggaaagggtggtgtgtcaggcagagtgaggcactgagactagggaaatcctcactggtccatctgcccaaagtagaatgtgaactgtattgaaggtccacaggagggtctcagataaggttgctgcctgcacagggagggagggaaaggaatcaggattccattatccacaaagggaagaagcaacatcaaacaacagatgccaagggctcttcataacagtccacagtgtgaagcaagactaattctaagaattgtggtggtacagacaaacttcactgaggacctgatagatgagtgttcacagtcaggatctcaactgtcgaaaatcagacacagagacctgaattggcagatacccagggactcacaactctagagaccacagactattagaatttgagttttgattttcaggagaatactgaactccaagtgataattttttctaaattttcatactgaattgggaatgaaattggatgaagatgacatcaagcctttaggttttgctgtaggtgtgtggtatccccagagttatcagaaggccccaagatgctccaaaatagaggattccttgcagattttacccaccaaataccacagcatcagcatcttctaactagaggttctcaacctgtatgtcttgacccctttggtaaatctctatctacaaaaatttttacattacaattcatagcagtagcaaaattacacttatgaaagaagcagtaaaaataattttatggttggggtcaccacaactgtattgaagattcaaagcattagggaggttgagaaccactgctctaactgttggcattcctgttctagctagccacactaggcaaaagtcctggcactctcttgcagaactgtgtaggccaggaactcacatggaggctggaagggtgctgggaagtaaagagcaccttccacttatcaccaagctgtggaggaagagcttcagtgctttggctgctgactggaaactgtagtgacttgacctcactgattacatgtctaatcattggccaaggaattgggccttcccacttgaagctgctactcaacttttcatgttagtagcacatggattctaaaaagaattccagaaggtttcactgctttttagaaagctctgggccacagaaatgtcagtttcagaaggcatgtctcccgggttcaaaacctatctgcatgaggctctcaacataaggggaggagacccagggttggtccagcaggaagagaaaggagccctgagctcagaaagtccaagaatggatgactataagagtcaaaatggttaacagaggccaggtatggcagagaacacaccatataatagacaaatttgaaaacagacagagcgaaggtaggaaactgtgttccccatagtcccagtagagacaggagaattttgagtttaaggacagtttgagatacacagcaaaatagtctctaatagaagaggaagaagggggcagggggaggggaggaggaggggttgagggaagaaggaagaaggggaggggtagaagaagaggagaggggaagagaaggggttcagggaaaagaggatgaggagggggaagagaaaagaaacaaacaaaagaaaagaaaacgacggtcgttaccagaaacagagtgggaggtggctgtcattgctgagctcatggctgtaaagagcaagagatgagttcattggctttagcagatccaatgtcttctcctgagtgctggtgacatgctgattatgtaggtgtgccatttttcaagatctggtcaagctgtcacttatgactaatctgcacatatgctgtatcaaaatctaatttgccaaaaactaataatcgcttgtgaaagcccccctgtcgattcttactaatgaggagcatggcctggcgctgcagcgattgcttcaagcctttagtttgaatctctttaagcatttgataatgtgattaagggaccaaggaagaaaaggaaggagagaacactgtggtgcacatggcgtccatctgaaggacctggacggggtaactagacacacatgtgctcccaaatgaagtgtgcaatgagaattccttaatggtataaattcaagataattggatccatcccaaaagtatttattggatacattatatacataaaccagagtgagccaacactagagtcccaggcggcaagaaaaacctgtgctcagagtggattctcatgagaaagtgacaattctttgagactatagtgaaggcttggcaggggggcggttgggtggataggattggagcacaaggactaaagagggagaagtcaggtgtgtaaccagtatggggggggctaaggacacccctgttgatctgattctgctcaggtttcagtttctaaaaacactaaaaatgcagaaagcgtgtcctgttctgcttgaactaatagatctagtatggacaattaattgaagcctccctgctcaatgtgtggaaggagagtgaacataagtaagagaggcagcatggggtacacgcctctcatcctagccttctgctgggaaggggaagcaggagagtaacaacaataattaataataataataataataataataataataataataataataatagatcaagtcctctttgggccacattgcaagactatctcaaaatacaacaacaaaaatatgaaaattctatgggtaaatatttggcagaagaatgtgtcagtttgatgaaagtcagatatcctggggcaggtgtgtgctgggcagtcaaaggattacacctgtattgtcagatgtgtaagggaggggaagtcccaagggccagatcacagggaccctggggtcattatgaggtattgtctgagtgtgagggaaagccaatgaagggctttgaggaggacaaagacacacacagcgttcttgtgaagactcactctggttgcttgagggtcttctacggaggaactaggcagaagcagggaggacgctggaaagtcatccctaggatgcaatggagtcaacacagaggttcagggagccagtgggagaggaagtgagggctgatgggctttaggggggctaccaaggagatgctgacagaacattctggtggacaaaaagggggtgcaggaaaggggatcaaagaaaacaatgaattttggctaaaccatcttttttttttttgagttcagcagacagggcgggtagtgtgaaatgtaagacaccaaagtttagaattaactctaaagcctagggtagagatgatggctgagagagaccatccttcgctggtgggcatgtgcaaagcccttgatttcatccccagcaaaaccaaagagaaagacaaggtacagagccaggtgaaggtcacttcaacagtgggtgtagggagaggagtgttaggttgacccctgaggtcaggtcagcattcttcagaggaaggaagacaaacctccaagggtgttaggagtggctactgaggtcagaaaaccctgggagatccagatgtcacatccaaaaatgtctgaagatggagggagcaccaggagatggagggagcatcaggcagcaagggagagtgggagggagggagggcatgggaatgatagagaaagaaacagaaacaactgaatactgattgttatagattgtttctcatagcttctataaagataaaaagaacagggatctctcttctccttctgtatctccctctgtctctgtctctccctctgtctctgtctcttcctcctccctctccctctccctctccatctctcttcctcttccctctgcttctctctctctctctctctctctctctctctctctctctctctctctctctctctcatgtgtgtatgtgcctgtacatgtgtgtacatgtgttatctcaacttaaataacaaccagagtgaaatccttcaaagaatattgacttctttagggtgggtagaacttgccagtgaaaacatactgtggtaactgtggcattgtgggcatatccaaggggattgattcgaagggaagttttcaagttagaagtgtgtagaacataagatgtcctaaggatgcttatctgtgcatatgtaacaggccagtttctgttaaaatggtccctagtaggtgtttagaaaatacttttcaagagcctactacgtgttagcagctcctagcatagatgacacccactgatctctactttcatggaacagactggaatcagcagtgagtaaaacagaagaagcaacaatcctcatgcctgctgtctgtatgatgtggcatatatgagccaggcagagccaagttcataccctgggaatgttgtttcttggtgtgcaatcttggagagtacttgagctctggagcctgggatctcctctgtaatagttgcgcagcttatctactccaagcaaactacagcaaaggttctcatcggactttggtatgagggaactatcggggcagccgtcattttcaggtctgttacaagaagagttttctataaatatatttaaaacctaagcctttctttcacaaaaatactctaatggccaataatcccagtaagttcccacaatgtcattgtattagttactttctcattaccttcacaaaatgcctgagtgaggaagggagggagggaaggagggaaggagggaggaaaagacggagggaaggagggagggagggagggagggagggagggagggaggagggggagggagggagggaaggagggaattttgtggctcacagtttgagagtgcagtccatcatggcaggtgtgtgagcatctgtaaccaggaagcagagagatgaatgctgatgctcagctcagcctgatttcttccttttattcagtccaggagctgctcacggtatggtgcgggccagagttagggtggatcttgtcacctccaataatcctaatctagaaaggcctgttgagtgtgtccagggtttctaagtgactgtagatgccagggaactgacagtgttaactatcagtgtcaccttgtgagtctgtagctcattccccagcaccttctctgagcctttgcccaggctctcacctctctctgtcctctcttccagtgtctcacttggctccttatttgcagtgcaaacaaactgagtgtttgaaaatcagacaagttagacccggtcttccaacctatgtgcacacacttgctctggtttttgaatcagatttaattttgtgagcaaaagagaagctattggcacatgaaggtagggactgaatgtgaacttcccagcttcatccatttgtctacaaagaccttgggtgttgataatccgatatgatatctcatgctcttctctgtagtggccttgttttatgccatttccaaagtgaacagacactctctttgtcttctgacactttcttatacccaaccccaaccctacaaacaaagggtgtcctccgcaaagtgtattgagattgaaaatgatagctcatgtgtgaaaagtacatattttctcatttataaatataagttccaaattagaagtctaatcacaaatggtcattttccagtagtagaaaataattacaagccgggcattggtggtgcacgcctttaatcacagcactcgggagacagaggtagttggatctctgtgagttcgagaccagcctggtctacaagagctagtttcaggacagcctccaaagctacaggaaaccctatctcgaaaaaccaaaaagaaaaagaaaaaaattacaaaatatgtaaaatttggggtacctcttaacgaattatcattttgtaaatgaaaaagtaagagcctaatggggtttgaatatcatttaccaagttctcgagtcaatttgtctataaacccattataaagaaactaaaatatccactctccattttattagaaagacagaactcactgaaagaagaaagtggttcaatgtataccttaaatcattgatcctctgctcacttggctatggataaatgggttaggtccctctgcaagtgatgacttcaaaccacccccgaggggccaggggtggctttgtctattgagactcctaactctggggtctactgcaagaaggcctgcttcactaaccacctgagagccatgctccctgcttcggcatctctgggccatgaagggactattctgatcatctgtcatttctttcccttcattttcagggtaagagacagtgctgactggcttgcatgcaatccccatccttcaatacattttaaatttagtttatcccactaatcatagcattaacaataacacttctgagaatgtcactttaacaggggtggggtatgtattctaaagcataaagcattgcatccctatgatgtaatctgtttccaccaggagcacaaatcctgcgggcagcagatggatctcagtgagggatgctcagaccagcagaagatccaagtgtcatgtctataaaattcccatagctctggcttctctgagaagataaggtttaaactaaggcatggttaaaagatgacgatggctccagaaagcccaaggaagtgtattaccatccagaaaggaaagtagcaagggctgtaaggcaggagagagctggagcacatgaagaatggcaaagaccaagttatagatcagggagaggccaggtcactggaggccagtactgttgatggcacatcagtggtgatcagacatgctttcttaaggtgtcactctggtcactgtggaccatgtcaggatgatcatggaacctacgagcaggcatctgcccaagatggctttgaggtgattagagttaagagaaagaaccagaaatggcctaagggaaggtggtgttgggaataactctggacacgtaaggctttatgtgtgtcctgaatgaaacactgataacacaactgctctgccaagtgtggtggacaatgaccaccaactctcagatgggcaagaatgtaaagcgtttaagtgtgctgggaaagccgccatagaagaagcactggttgggggatgtagggtaatcaatgggaggttgtggtggtatgggtacatggacacttgtatgagggatgtgtatgtgtgcatatacgtgtgaaggccaggggtcaacgttgggtgtccatccacattacctcctaagacaagatctctcggtggaacccgaggctcactgacttgagtaggttgactgagcaggcagccctagacattctcttagctctatctccacagtgctgggattaaaagtgctcttcatgtgggtgctgggatcaaactccagtcattgagccgcatgacaagtgctttactaactgagccatcttcccagccccaggaaattgtctcttgtgaccacagaaagatgatcagaccctgagtgtatacaaagtgttagtttacagtttgggaggcctgatgccattttggcaagggcttatttgatggtgtcatctcatggcagatgacatcatggctggcatgtgtgcaagaggaagaaaccacatggagagacaggaagcaggagaaggggtagagttgggcttattattttagtcacaactctatagaaataaaactaactcaaggtcctgggaaatttccctaactccatccaagggtgatatcctttatgttctaacagatttccactaggtcccaactcttagaggtctcacttcttaacatcaccatagtagatcatagagacatcaatgtcaggactatggtatagacccggtatttaagcatgaaacagccatgcagaaatatagagggtggttctggcattgtgtagtaggctcaagggcccccaagaggactgggacaagcctggcatacacccattaaaagcaaaagtcagtccttctgctacttcacactgcttgatcaggttagttgcaataatcccaatgcttgtaaaacaagaattaccctgcagaaggttgggtcttttgttaaactgagaattatctatccaaaattccctaacagtacacgtagatacttttcacacagcaaaaaaaattcttactgcatcgttgccatttagataatgggtggagtgtcacttggtcatttaggaagggcttgtatgtgtggaatagagagaggcagacagagaagtaaggagggagagaaaagaagagagaggagaaaaaagccatggcacagtgtccaaccacagtggctttgtgtgtaacagatgaagtcatttgtttgtaattgcttaaaagagatgtttacccaaggagctgctagccacatcgagacgccagcctgaccttcatgagtttgcttagacaagtggcagcggtcagtaccacatggtgctgcagcaagagtcctcatgagtcccttattctgacccgctgagcaggacacctttcttcagacaccttagccatggccagagcaatcccctgcatgtctgggactttctgaaggaattagtgggaccctggtcatttgatatcagataagggaatggtccaaattatgggttcattgagactgaataaaggaagagaggcatcaatgaaggaccacccttctctagaaaactagacaacatgccactaaaaaaaaaaatcctctccttcttctgcatagaaagtaaacacttgtgtagccatttcttatgatttctctagagaagtatgttagtatcaaaatccagtctagcatcacaataaacattttctctcactgaaactgaaaccttggagctacttcttagattgattctgaaaaggccgatgatgagcaccactagcaaaggtcttggccatctcacaagcttgggcatgtcattcaatcacttggacatatatggtacattagaccaggcagcatgtggcttgtgtctccaccaacagccatgagatacccaatgggacagcagtggtcaccatgtctccaggatcagcagaccaaattcttctccattctgactgctggatttctgccttcactagataggttgcccctgcctttcctctctagggtatgtcatgcttctccaaatccagacaagtctcctgtcggtgggacagacatcacactacatgtcttcattttagtgggatatatgaaccttgggttctaagtacacctgtgcctgatgtgtctcatggccccttcattatcagcaggaaaataccccggcacggcctctacctcctacccttcactgacaggtgcaagtcagccatctcaagagctcagggccttaaaactggaacaattcacttcatctctgaagagaaattacagagtgttggcagctacatgcagcaaagcccctgccaccaagggaggaatgttctgtccttcaaaacacatcgatttcttttgaattgataggacacaagcacttagaatgctcagccaccacactttgtcctttggcgctgcaacatctaagtacttgaacaatgccttgagaggagcattatgtgacagcaaacttccaagaaaggcagattttacagatacggtgcatctttaatctccttttgaaaacatacaacatgttctggaaggaaacacaagcaattgtgacaacagagagatgtccgtaataaagaaattcttttgactccccatgagaaagaaaggagcattgttataggatattgttaaagacacaccctgcccccaaagaaatgttcccttagaattagctgtgacaatggggataaaagcacatgccccaaaactgtcttttctctgcctccctccttgtctctccagcctcagggaactatctctttctaaccccaccacagaacaaaggccccaaaagaggttcatggacatttcaagagatgtgtcaaatgctagcgggtagttcttaccccagtgtttaattagtccttgaagaaatcacatgctaaattgtcaaggttgagttcctgttggtggattttgttagtctattttatttcttaggatctcattacacagccttgccttccctggaatttgctctgtagaccagactggccttgaactcacagaactctcgttgcctccgcctcccggagtgttgggattgaagttttgttccaaccacaccaaacactcttgttttgttttttgagggtttggtttttcacagattggtcctttgctgtgtctggtcttctccctttgcctcactgtattagtttcatttctgctgccgcgatgaaataacctgacaaaagaataaacacatgaatcctggcttgctaacttctttgctctttgtgcttaggcagctgcctttactcttccacagtccaggaaggatcccattaaatggtgccattcacagtgggctgggtcttcctatattaaaaaacatcagcacaatcgcccacccctgataggcacacaggccaacctgatccagacaattcctcagatgaacttctattctcaagtgattctaggtttgtggcaagccgacaatttaaaactaaccaaaacatttaccatttccctgtattgttttaccacgaagtaaaactcatgtctcatgtctcccatgagagcttggtgttgaagtggaggaaacaaaagaactcggaactccagataggtagcaatcgtgactcaagcaagttaaatgtgttgcagatgaatctttatcttcttaaatgaaatgtactcacttgtaaatgaatcagcaatcataaatgtagtacaatctgtggatacaatgaagacataccagtgggaactaacagtacttgctatgagactaggccacggggaagaaccatgtgtattttccaaagatgttaaatcaaagaattctaaggaaaatagagagacaaacactggtaaaggatacttatcccaaaccagaatctattgattggcacagtagacaacacaattagacaatagaaaatcaagtaaaagttacagatattgggatgagacagtgaaagagaacttttatatagattatgttattctttgtacagaatagcaaattaaattatagtaaatagtacaagatggttaaaaattactatatggctctcagttaagtaattaagttccacatatatcttccttctttggtcttcctaagtgcatcacttttctttcctctggtttcattgtgaatgtcaaactttgggtttttctagaagaaaaactctacatgtattccataaattttcccacatctcatcaattttacattgtactgccaatgtagctgaacccatgaaaacaagcataatagagtagtgggaaataacaggatagacaagatggctcagggggtcaaagtgcttgttgccaagtataatgacttgagtttaatagctaggatctcacttggtggaaggagagttgcgctctctcgctctctctctctctctctctctctctctctctctctctctctctctctctgacacacacacacacacacacacacacacacacacacacacacacacacacatggcgcacatacctgcacacatacacacaaaataaattaagaatatgtatcaataataaggtcaaggtgatgtcctaggtggtcactttagcacaccaggaaaggcctcttgattcaattccacatttcagatttgttcagattagttgcaaaaccacatagcaacctgaggatgaaggctcccctgaagacacaatgaggcactcccagaagactgggtgggctaagcttagtgctagaatgaagtatcatgtagaaaatttgtggggacacattaaaggagagtaggagtgccccagaggacacatcttttcatattttaagatctcagagacaaatatttgtaatatccatggcatcatagcatctcagtggccggcagcagcatttgtgactcagctgtcattgtatagccttgataatagctgttcatatttgcatgtgtcctcttgaaaagcaagcattgttgctagttgccatttaaactgttttcagaaaccttcccctgtaatttaactgtgaaatttggatgcagaaatacatggaaatagaggatcagggcagcacattagtattagctgtacattccctcattggacagagaatcagggctctgcatgtcttgcaaagcagctgccaaatgcttccctggacctcagaaaggaatatatcccccaagtaaatggagccctgttacattttgttcctgctgtgcatggaaaaaacattatcgtcacacactaagcagtgctattgaagaaaagagaaatgaccaaatttcttgaaacagacagaagaaatttcaaagcaataagaggtacgatgtctcatccatgcataatgcaagactattgtcaaagcttcagatatcaattgaactaaactttcctgatgatttcaaacggacactgccataggtcaagtcccatgcgtaataaaattagaacacatgagtttgccaaataagaaataaaaaatatcaatgtgctttggttgttgttcttatgtccctttaagtgatactgggaatgctacagacattcacagaggaagatgcaggctcatgatacccagtcacaactcccgctctataataatgcttcacttaaatatttctagcccaatttgcagacatttaactataaaccacaaaatggccacagggaacgaagcttcccccaaagatgtagtaacagcattgccgctaagtgcatggactgtggcttagttctggaactggctgaatggatgttctggtgtgtctcccagggcaagtaggcacatcctagaccgagagaagatggcaaccaagacatagaggaaactaagcccatttgcacagcagcttctccgtggcaaggtgccttgccatgcagacatgtgactaaaatggcagctgggcccctgatactacacagagttctgggtagccacccagaggtggcacatgctgtgtccagctgcttaaagagctacatgattctggctgcatccctgtttgcctagagtagagcttagtgtttacttgacactgcaggaagatttttgaattgcaatgtcataaaatccttatagtttccacattgtcctgtagaatactgaacacatggaaggcccccgatacattcattgtacggtggcccaaaaggccaaaagtttacatgagcttggtcatcaggaatgactgccagtatatgtacatgtttttcttcttttggttactttctttgtcagtcatgcagaggtgtccttcagggtcttttatgatgtgccttctccggagtccgtgctgcatttacctcggcttgtgttcctctctgccatctcacccaggtctctgagcagagaaggctttgggggcttctggtcacttcattttctttcttttaaatctgtatcatttctgtgcagtgaaaatgaatcatcattggatagaaaattcttttaagtcatcttggttttagcaaaggccaaacagcacggctctgcatttagctaagtggttaaattgaagctcttatactgataggaaatatctgagacatgaattaaaaataaacagtgggcttgggggtgaaggctcggcagctaagagtgctattgttcttgcaagagactggagttcagttcccagcacctgttctgggcagtttacaacttcctgtaactccagctccaggggatcacgtgacctcttctagcctctgtagacacacaggtgcaaatacacaaacacacacagagagagagggcggggagagagggagagagagcagattaatttctgagtgaagaatttgtagtctagcaaacatgatattgaagacactgactagatgcagaagggaaagtgaaaagaaagacaagagatacttggatggacagactgacagatattagatgcttcatgcaataggcttgtgctttagaatcaagcaaatacacaccttctttaacaatgacgtaggggaaaatcccacaacaatacaaacaaaagcaaagcagaaagcctcttccatgctttctggatttactttactattattaagagtactggggatgtctttgttttaaaaagaacattctatttcagagctaagactgattacaagtttatgccagccaaggaaagacattgaatactgtcaccccaatttaccatgtcactaatttggcaacagggggattattcttaatggattgaaagaaaagtatcatttgtttccctgtgtgtatctaaagctaatatttcatgcttcttaaatttctaagctatcatgtcacagactgcaagcactggcaggaacatcaagacatacctatagcaaatcccctcatttcacagaggagaaaatagctaagtaaattgactactgccaaaccttacaagctgccaatagagccaaaagtagaacccgagtactgactttttcagctctcttcccaggacaggtttgtggatcacgtgaccgttaccaaggatacccttcttactcattggactacaggctggtggcagtaaaatctaagaatgccaggaacccctcctctttagacagtttctcaagcttactaaccacaagaaaagtatatgaaggtagattttgattggaggaattcatacttaaacctaagagatcaaaagtcgtaacatggctgccccagaaagacagctatacaagagcaaactgagagacagtgggtgcctcttcccacttctcaggtgaggaaacagacacatagatacacacacacacacacacacacacacacacacacacacaccaccaccaccaccaccaccaccaccaccaacaacaacaacaacaacaacaacaacaacaaaatagacaaaaacctcatggccacagacaaagtaatttgaagcaactctttctccatgctgggctgcactctgcagcgtggtgtctgtagcacactggagacttagctaggcctctagccaatcaataaataatgcagagatgagagattgaggcctcggcagctctaccaagacctattaaaggaatctcagttccctttggaattgcagtccttctctcagctctgccaggaggtttttattttatttgttcttgcagtttggatggcctcctccattggctgcggggtggatttgattatgtcatttcatttgtctcttcccagcctgtttctgtggttgaagtgggttggaaatggacccaggactcattgtctgaatgggagtgaagagagtttctcaacaaccttgttcccaatacttacactgggagggtccccgtaacctcagaactcctcagttctgtttttgtcccagccttactcataccataatttcctgtagtgccagacaataccaccaaagtcggcagcaggcacttttcagacttaacttgtgtgtgtgtgtgtgtgtgtgtgtgtgtgtgtgtgtgtatgtgtatgtatgtgtgtgtgagtgtgtgtatgtgtgtgtatgtgtgtgagtgtgtgtgtgtatgtgtatgtgtgtatgtgtgtatgtgtgtgagtgtgtgtgtgtgtgtatgtgtgtgtacgtgtgagtgtgtttcacattatgtacatgtgaagaaagggtgcacattcctgtgcacatgcgtgtgcatgtgaggccaatattagatgtcttcctctgttgcctttcacgccacttttggagacagggtttctaactgtctgagtcagggttactattgctgtgatgagacaccatgaccaaaggcaagttggggaggaaagggtttatttggcttctgcttccacgtcacagttcatcatcaaaggaagtcaggacaggaacctggaggcaggaactgatgcagaggccatggaggagtgcgcttactgacttgcccctcttagcttgctcaacctgcttttctatagaacaggacaactagccccaaagacggcaccaaccccaatgggctgggccctttcccatcaaatactaattaagaaaatgccccagagtcttggctgcaccaatcttggagcacttcttttttgtttgtttgttttttgttttttcaagacagggtttctctgtgtagctttggagcctatcctggcacttgctctggagaccaggctggccacgaacacacagagatctgcctgcctctgcctcccaagtgctggaattaaaggcgtgcgccaccaacgcctggctggctgcaccaatcttacagaggcattttttcttgatggaggttccatcctctcagcttacatcatgataacaaaaagctaaccagcacactcactaaacctggggcttacctacttggctggactggctggttagcaagccctagggatccactctgcttctttggcatcagagttacagcagcgtgatacagcattccacctttgtatgtgaatgctgtggtgtgagttaggttcctctagattatacaacaaacacattgaaactgagactttcctcagcccccaaacttaactcgtgaggcgggaagaagtgcctgttatttacagtgtttgacatcagcacagaaaccacaaagtggttctgcattaatccatagcaaagctttcctgtgtgactcctgtgcatgctgcgcaccgaagagccagaccataagctgatgaactgtgctgagaagggctgaagacgttgctcgtcagcttccttggtatacaaggaggaccactgaccaaggtttaaaatgaaagagacgagtgcccactaaatcactatctgtgtagaatatgccttcataagcttccaggacattttaatgtgctctccaaatgacacgttgtgatctgcacagtcctctgtgaaggaacccttgtaatcacagcaatccacccctgcaattcaagacagcctgcctttggcaagaggaagcagccatgcttccagttagatgaagggacgagagaggcttgctgccgacgttgggaagcagcagcctcctgcctggcatgctgcagccatgctttcttccaagtccagagctagagaacacatctgctcctggcaggcccagcactgcttgcatgttttccagtcacaggcccctgagaatgctgctgctgattttcttcagagatcatgtccttttacaatcctggaagcatgaatggaaccccatgaatggaggctggattacagctgtcatccattgcattctggttctgcagaggagggaacacaccacacctgagccaaaggcagggaaggcaagcatcatggagttataagctcctggactactacatggcacactgagaagtttccagaaaaagccaagagcatagctatagtactttgtctttcactctccaccacattttaactaagtaagggcaaactggtcaaacttccacagccattctcaaaccaactccagctttccttcagaacaggcaggagatcgaactgttgggttagcttgttttgtgaggtttcttgtatgtttggagtcaggggattgctctgttgctctgtaactggatagttccctgcctcacccaccccaggtttgtgacacagtccctggctaacattttttttttaagttcagtgtggctctgaagattgcttaaccttggggccctgtaactctcaggaggaagtcaagatttgtattaaagacgataatagagaatatggaatgaccaaatgccaagttgaatgatggcagcaatatagtcttaaacagtttgggaaagagaaattcactgtggattttttagtgggttatttttcagcagcattaacaaacataaagaaacttgatcggatcttcaaaggtagacgggacaccacactaagagtggggattccaggccttcagtggggaatggataaagaggtaaatggtttatctggggcaggggctaagctagccaacacgtctccacaaagcccggtgccaaaagtggcaaaaagtctaccaagaagacaagccaggagagtctggagtgagcagcagaaagacacttaacacaattggatttcccttctgtcagtgctaagtgttccctatagaagctgaaagctaatgtctaccaaccagatcatcttgtgtggcaactgaaaaaagaaagcattttcaaatttagagtctgtgtagcaactgtctcctgcctgtccatcttgtagttttaccgagcagcaatagctattagtttgctgggcaccgttctgaattataacaacgttttaagatgggctatgttgtccccgaagaggcaggttagcacaataacttctgagggaggcagatggaagtgtgaatcccagctcagctaatgacctcctgggaaccttgaggaagaaaccaaattttgagtctccattccctggacagctgttcagaattttggactccagatgagatgggacactagataaaatatgggtgggagtgtacctgtcacgtggcagctactcagtacatagggactactgttactcttaccttttccccctctcatttttactagctctttgagtacgtcatgaaatgatcatactcacccctccctcaaccccgccacacccacactccattccctatccaccctccttctcacgtccttttctctattgtgatagtttttgtctttattttttttttaatccatcagctacaacttgtactacgcatataccgttgggtgttggaccttctacaggagtctggttaacctcccagggcccacatccttaaggaaactgtcagctgccaagagcaccccagcgaggggagagacttcttgcccacctcctctgtccacactgggattttgtctgccttgagcttgagtgtagagtctgtgtgcacgctgtcatctgtgcaactgacccgctcttgtccagaaatcactgtttccttgtggtcacccactgtctccagacagtcaatcatgtcacctcctcttctgccatcatctctgccccttggaaatagaggatgtgacacagctgcccacttcatggctgaacattcatcccacagcctgtacgccccgcatcctgaccaggtatgggtctctgcgttagtttccatcttaccaaattctatgataccttggagttccctcttagctgtgtgcatcacaggtggggcatggcatcacaatctttagttacctgtactttattttctgttgctttccttttttaaaaaaaatcccagtatatccaaattattcctgaagttcagccttaaactgcagagcctacatgttatccaatgatgccaaagaggtaaaatagaccaaagccagatgatacaaatacaagatggggatgtggaacctatgaaactcgaggcttgccaaatctagagactacaaaataagctaatcatttagcagaacaactggctggacgggtggaattatcaatttagtaacagattgtatttgaatcctgtcaccacttcatatgggatggccagaaaattctaagaggtcaaataagtcaagtcaggaatagaaactgtttaaaagcccatgcctggggacatcataggctctgggatagaacatgctaaatggccacactatcaaattgccttctaaatgtttatgcttgtacgcacggtcttgagctgctctgtctgtggtcagacaagcttccttttgcagtgagcagcagtcaaaggtgagatgcataattggtcaagacgctgagagtaacaggcctagggctccaccataaatgtgacgtctatattaaccccaccaggaccaaggctcagagaatatcatgggagaagagaaaggaagaggcagagagtggggaagagctctgtgaagtactgacttccagacatggcatagccattgcactagtgcacttaccgtaaatgtgatgacctgaacaaaagcaacacaagagcaagccaggcagagtccagcatacatgggataaatgatcttaggccccaccctttactgaagagctactggctgtgcagttgccagaggaaggagacatggagcctggtaagtttttgatgctccagtgaacggcccaacacccatgggcagctcaagccagcaacactaatcagtgatactgaaatatctaaatatttaaagcaaaccaaagacataaagttgggggcttatgatgagatggataaggggaaagctggatggggaaaatgagttgtaaattttgatcatatttcattgtatgaaagtctgaaagagcttctctgtgggttgtgcttgctccagagctcacattccttgtatctgttaggtgtggcccctaggagaatggcgatcatttggtgggaacaaatactgcctgggagaaatgataatcatgtaatttacatgaaatgtagccctggctggcctggaactcactatgtagatcagacagactggccctgaattcatagagatcttgcatctgcctcctgggtgctgggattaaagccatgcaccactacactgagatgaatattttaatgtgaaaaaattaagcagtaatttttttggaaaagatctcaggaagtgtaaacacaatgaaatctaatcttatatttgaaaaattggtaaataacaatgaaaaatattaaccgtatatgaattacgccactgtattgtgtcaaaatgttcaatgtgatgttctaaaagatgtcatacccaaagtcaatggagatctcagaggtttgggcaagaagaggccaaacctcacagtgaagcatcagtccacacactaaacaaaattgttcagaagtttaaggaatgggttagaatttcattaaaacgagtatgtggctatcccatgaaagtacagacaaaggagcaaagttgccagtcaaagaagacctaatgcattagcagccaggaaaaggcacaaaatgtaaagctgagatcatattttataaaaatagtcaataattttaaactgtaaatactgtagcaaatttcctaccagatttaatgtcctgtggggagagagacattgtgtcagttttggccactacattgctgggatgtaaactaagttctagtgggggaattgtgtccttattcagcattcatgaagtgaacaatagacacagctcacaattctgccgcactccctatgttcccagcagatagcaattcactctggtaaggtgagggacgttagccctgtttcacaggtgtgcaatccaaggcccagggttacttagtcaacatgtgacagagctagaacttgagcccaggccgactgccgcaagggtttctgtatctaatgaatggctctggagggcagctgaacaatcggtgtaaaaaaggaaacccggaaggaactgtacacctagaaataaaaataccaagttaggacacattcaagggtacgcatttccccactgtccaagtggagagagcagagaaaatgaagaatttatgttacatattcaactccccttttcatgagtttatttctgttgtttagtcagttgctcgtggacttctgatacactacattttttgatgtattaaacgattggctgtgagcattctaatgcgcttattgctcttttactttgttgatgtgacattatggagtgagggaagcttagatgttgatgaggcgttcgtgcttaccttttctccttcatgttcaattgctttttatgagttgaggaagaaagatgtgcccatccccagtgtggattcacctgtgcttgcttctcagcatctgtacttttcacttttccttgtatgtttaaacctacaattcatttccagttattttcatgtagggttggagaaataaactgacgctcgtttaaagttcttagtcggtggagaagtatactttactgtcacaatgaggtacaccacaaagtggctcaagaggccaaaatataaaggactcactgctgctggcaaagctatttaaccctggagttcatatcattgttgatgggaatataaaacattctaataaccttggaaaataactttgagttacgtgatagttgattacagttgtcaacttgactgggtctgcaaccaactaaaaagccagctgctaggcagcctgtgaggaacctccttgactggctcatttgaaatgggaagacccaccattaatgtaggtggcaccttcagtggcaacccacacgaaaggagatagagatggaagaaggaaacagaattgtcttcctgcttacttcctctctcccggaaagttcacctaccttgatgctgctattgctacattccttccgtgattagatcaggcttcctccggcttccaacgtgggctgcatcctccagaccttcagcatcacactgtggttatgagacatccagcctcgtggactgattctggattctgagtctccctagaatgaagacagccatgttgagctacccacacagtgttgggtaagccagcctaatacattccccttttaatacatatttagcatatcaattctacccctctggaggaccttaatacaagttgctggaattcactgagtgaccaccaagcatgaatcctagcaactgcacatccaattatttatgtaaagcaaatgcaaagataatcccacaccaaaacccatgagtaaatctgacatctttatctatatatgctttgaactaaaattcaaccaaacatctgtcaacagatggagggactctttaataaaagatggaactgcggtccacctgccatactatttaataatacaatgtaaagtcctgtcccatacacacaaacacacacattatgtcttatttgtattaaatgaggccaatggagcagcctaaggcaggggcggggcggggcagggggacgacgatgactaactgtgaagttcagtgggcactttgaagcatgatgggtgtcaacaccatgactgggatgatggtacctctggatacattagtcacactcactgacatcttctagtctaagaaaaccatacttcagtaagccaaaataaaaagggaagataattgaattggtttaagaaatacaacacacacaaaaaaatcaagcccttggcaaaggtcccctctttgtgagagtgcagcgcagtctgcatggtctcatgggcttcggtgattctcgccaaatcactcccagccattgaatcaaagtgccttttaagatgaactcaggtaatcatgtgttgtctgcaaaaaggaggttctaaactccattcatctcctgggcatgtattacagactgccaattgctcttggacaacggcctgtgggagctgcgtgatgtatattccctggaagctgggtgctgattcacagctgtgggccactgctataaacttagcacatgctaatgaaaactatcactagtgtaagaggtcatctatcaaaaatgtatgagacggtattggactctgagccatggaagctcagccaccccactcctgggaagccagaacttgggacagatggtcagcctgcacaagtagcaaggttggatccccagtactaatatggtgttttgtgcttgtgttctcagcacttaaaatgtggagacaggaacatcaaaagttcaaagtcatccctcagctacatagtaggttccaggccatcctagaatacacaagaccctaacttgaaaaaaaaaaaataaacagaaagaaagagggaaagaaagaagggagaatataatctaaatgccttatgtgcatgtatgaaaatgtcataatgaaatccattattgtgtataattaataggtagtaataaaacttaaaaatcaaagtaaaattgtggggtggtgagatggttcagctgccgggagcacttgccagcaaacctgatgatctgagtttgatctggaacccacatgataacaggagagaattgttcccttgagttggcctctggcctctggaatgccacgccataccatgtcgtgacacaaacaaacaaacaaataaatatataagaaacaaataaaataaataaatgactcacataaaataaaacttggtttttgatgaacaatctggtagtgtccatgaagtcaggaagctatataaccatcatcactatctaaatctttgtggcgccctttccctactcctggaaactatttgagtgcttttggtcttatgggatttgcctattctggatatttcctgcaaatggagccatctccccagctctgttttactgtatttctgaaagagagatgcactgaaaagctaagaacaaaatgagagagagagagagagagagagagagagagagagaaagagggaagtgcattttagagttgagcatgcctgtaattccatggcatgcatgcactcacattcacacacatacatgtaatccatatgtatgaaaatagtaataaaaaagtgaaattaaataagagctttaaaatgagcttcaagtgaatgtgtgagttcataggtgttgaagagcaggctgggccctggctgcctgtgttcagatgcgtcacagggacctgaagggaaggcacagatgggaacagatgagctcccatccacaagaagaaccacaagcaatagctctagtcccactcttgacttcccatcctttcccacattactgcttataaacagctctgcaacagcaccgccaataggattatcttttgattgggccaaagcccagcatttctgtgcctttgcttctggtaattggatttagtggcttcgcctttaaaaacacaaccaatttctcaagatttcaaagggtctgcttgccactgtctcgtagcctttttaacacctactctttctagtaggcatagagtctcaaatgaatgcgaaatactcaaaggaaaatcttattttcaataattaatgaagcctctcagagtctcagagtgaagaaatgtggactgaattactttttcttggataaagagattggtgaaatgcccattctgggaaatttctgtggtgttctgcctcagtagtgcatgtgtctacactatagatattaagataggaagccacccactgaagggaaccataggccatggcagcctgagagtaaggaagggtaccaagccaggctaggtacctgctgtcacaaattgaggttaattcacagtcaggaaccagaaagccataacttggttggtgtagaattagcaaacagcgatagagtctgggagtgtagctcaatggttgggtgcttgcttgaatgtacaaggccctgggttccagcaccaggactgaaagaaagaaagaggaaaaaaggaaaaggaatagctaagttgggctttttgttgttttgttttttctgttttttgccttgtgttttgttttgtttttgcacacttctgattccagctctcatgagagtgagctaggaaggcaccaagtctaattccagcctaagtcatactatgagactgtgtctcaaaaaacaaatcaaaatagttgtggctggagagagggctcagtagctaagagtagctggtgctcttccaaacaacccgagttcagttcccagcacccatgttggatggctctcaacaatctgtaactccagttccagaggagcagctgctcttttctgatctccatgggcacctgcacacagctagcatacacaggcaggcaggcccatgcgtgcacacgtgtgtgcttacacacacacacacacacacacacacacacacacacacacacacaaataaataaatattaaatagaaaagacaatgctatgtcacccctcctttctcctttctccaagaaagtactgatgttaagcatggactcaattatgtagcaagtcctttgatgagtacagtattatggactagaaagcaaagttgcccaaataccacatgctctgtagacaggaggtaggggacatgtacagtcaacaagaaatacatgagctttatataatgatgacaagttgccagccaatggcaaaagagcaacttgaaggaagcaggaaaggtggtttagaagagaggcaaaaccgtcaaaggggatgctaattaaaggcttgtgtcatgctttcgatttaaaagacaccccggggcatattcatacttgtgaaaataacagaaattccttaatacttaacaatacatcacatttaataaacagaatatatatatatatatatatatatatatatatatatatatatgctgcagtctaaatcatttcaggtggccattaaaactactaactccagacatacttttggttttatgttaagcaagaggcctaattatgaaagtgtataaacaacacaactgctattggatctaagaagaccttagaatacaggttagggaataaagcatgatactggggacaaggagtacttttttttttctagttttctacttcaaatatcatgttttgtgggctcatattatgtttgcaatcaactcctttgtcttgctaaggcttgagaagttttccattctgttcttctcttgcaggatggaaaacatggtctcgatctgcaggcttccaggagaccggagactcattcattcataacaactccaccaggcgctgccagaggaaactgagatgagcaaagtagaaccagcagtaatgtcggctgactggagtctgagccctcactactacacagagacttgtaattcatcttcaatgactgtcccaggatataaagttccattagcgtaatagacataatttgtctaattcttcctcaacccatgatctctaaaatcaagatttaactattaggaatgattactgtattggttgctctcttgttgctgtcatcaaattgcctaacatagacaactaaaaaggaaaaaaaaaagagttatttggcttgtggtttctgagggttccatccacggttgtttgtaccagtgccctacatgaaaacatcatggcttgcttacttcactgccgagtgggaagcaggtgccccagaggcctgcctctttcaactaggtcccatgttctgaagtttccagaatcctcaaaataatgccactagctgcgaccaagtgttcaacatgtttaagcctgagagggacatttcattccaaaactgcacccatcactctagttcaaagtgcagtgtgtaagtgaaagttacaggaagttcccagtcttttatgtttctgtgtaatgaaggcagcctcagacttttaccagtttgaaaagctcctctttctgctataggaactttgacaaaacatccttgctgacagctgggcttctaaagaagctcagagatagaaatcttaatacggggtaggtagagagagtggggaaaaaggaaggaggggtccctaaccacagccttggtggagatccccctggtgccctcaaaattaactctccactttgcatgtgtagcctcagtatggagaacaggtgcttgtaagccgccctctcaaatgaacctgagcagccgacatcctgcaggtgtacccctgataagatcaaggagacctcaaccctgcaggagagcgcgacagaacttccggagtgagctggctggagatcacatactgcttagctagatacaactgagttaataatgccaaattggtgtctccagtactatttggtgaatagagtcacactgtagttatctatatagtgaactaggtgggtggcagacatgcctctggaatttagacaggaaggcccaaggttttggcagtctggatggagaaggggagctgagacctcatagtaagaaccaagcttttaccaggattggctatctatgtgggtggaagctacaggccatctggggcagcctctaaagatcccactttcgtttttactgtctaccaactttttttcatttaatagtgtgtttttattgatttgaaatatattgttctgttgccctgataagccccgattataaacagcaccagcaggatattgacatggacagataattggtccaaatggattccactgacagctagagtgaagatcatattattgagaggggggaaaaatagataagtgactacctgacccaaggctgctttaatggaactcgtgtcaaatggaaaactaacacttaagccaggtggtgccctgtggagttctgctcagacagcttaccacctgacaacatgtatagtttttctgggaactctcttcaccataagagagtactacatggtaccagtactgtgagtccaatcgctgactaaaatttgatgatttgaacttcgacccctgagctaactcaggtcactgcccactgacaggggaatggagtcatgagccagctgcactgctcaatgtcacgtctccaaaagtctggaattgagcaagagatgaggccagtttccttctggatgtgggctgagtaaattcaagaggcatacggcccagggaagagggaaaaagtgaacgttatcgtgaagccaagaagggctaagataaaccttggaaagtggctcaaaatattgtttataattggaagaagaaatgtgagcatctgacagtttgaagatagagcagcaacctactagtgttctccacatccctgctggagtatacagacgattgtcactaagtctaacgttggtaattactggggttccaattactggagtgttctgaaacactccaatctgaaacatttgaagttcggcctttgtcttgtggctggttatacctagtcttcagcccactcctcactctattttctgcccatcacaaagcaacgatgtccctccactatactgccaccgtcatgatgtccggcccaggccccagaactttctgaaacagtatacgaaaacacacccttcccggactggtcaggtacttggcaatagttacctaaactttctcatgcccatcccttttcccccttaaatgtagaaagaatgctgtcaataaacaagtaggcaaatgcaacccagtatagtctttagacacgccgtagccaggagactgggcctgtacaacacccgcttcactttgtgacatctccatttcccagtctttctagacacaaccagtgcaagccaagagagaaggaaatgaagccattgtcctttgacatgcccaaatagcctttgaaatcctctcccaatgccgttggcaaagagaggtgtgcatccaaaactgacgtgtcctagcctgggaccctgagagttgtcagcatactccacttcatgtcagttgggagcagctgtgagatgtcgcaggataaacctgctgctcctctcctacagcccattactcagctcgtgcccctcccccaaaatcatgtccatttcaagtctgggcacgtgaagcctcttcacttcatgtgtgtcagcgaagctatgtttactccaaagtgttttgcttcctttgccctgtattattacgagtcatttaaaagtcgtgtggggactagagagatggctcagtggctaaacccactggctgttcttccagggtacccacatggtggcttcagctctcgggataacatgctagtgtcaccccctgggtctgatcacatgggctgacagagcatcggtaggtcactctgaaggacaaggatacaattacattagccatctcttccaattttgaggaagaaaatccaaaaattataaaataaacccaggacctaatttaatgctgagtatgactcaaccaaatgcccctccagggacacaaggaacttcacacatttcttcgtgatggctttattaattccagcttctgccaatggcgataggagtccacttaaggacagtgggctgtaaccgttccagggagcgtggctgaaacgctttccttaagctactcacagcctgtatagaatgtatgagcagccactgctgggtccctaactgtccccagaggtaggattgctagtctaggaatgtatttcattgagtcacatgatcacgggtgctgcatgtgcttctcatgttttccttgcacacgaagaggaaggaccaacataggaaacataaaattaaaaatcgagaacatgaggctggagagacagctctgtattttggaggacatactgctctttcctaggacctgagttcagtttccagcatccgtgtggggcagcagctcaccactccctgcaactccggttccaaaggatccaacacgcacaaacccacactcacacgcacaaacccacactcacacgcacaaacccacactcacacgcacaaacccacactcacacgcacaaacccacactcacacgcacaaacccacactcacacgcacaaacccacactcacacacacaaacccacactcacacacacaaacccacactcacacacacaaacccacactctcacacacaaacccacactcacacacacaaacccacactcacacacataaacccacactcacacacacaaacccacactcacacacacaaacccacactcacacgcacaaacccacactcacacacataaacccacactcacacgcacaaacccacactcacacgcacaaacccacactcacacgcacaaacccacactcacacacacaaacccacactcacacacacaaacccacactcacacacacaaacccacactcacacacacaaactcacactcacacgcacaaacccacactcacacgcacaaacccacactcacacgcacaaacccacactcacacacacaaacccacactcacacgcacatacatatacctgatttttaaaaggaaaagtaaagagaagtcaagaaccttcaaaagtagtggttaaataaatcacattaagtgtcaggatgatctatttctgttgtttcattgtcctagggcagggccaggagcacagtggcactaagcaaaaatttgttaggggaataaatgagattttcaaataatcaatcattaggaaggcctaccattttaactttaacatcctaggagagaaaaatgaagaatgaagtggaaatgaagagagagagagagagagagagagagagagagagagagagagagacagacagacagacagacagacagacagacagacatggagagggtggttgtttacatgctatttaccgtcctagagcagcagttctcagcctgtgggtcgaaacccctttgggggtcacagattaggtagcctgtatatcagatatttatattacatttcataacagtagcaaatctaaagttataaggtagcaacaaaataatgttatggttggggctccccacaacatgaggaactgtcttaagggtcacagcattgggaaggctgagaatcactgtcctagagaggcagtgagaacacagggatgtccttcttggtcgttaagtcttccataatgttcacctgagtgacttgctatttccaagacaccagtcaggacccctttcattccataccacgaacagacagctgtaatttgcttctggacagagaaacctctccaaagtaggttgagtaaagcctccagtttcctaggccatcaggcagggttcaagactctgatgccaccgcccactctacttgctatgggttccatttactttgaatgcacccccccccccgatttcttgtgctgggaagttggccccattgtagtgacgttgaggtggggcaattttggaaaacataaagcccaatggaaggtagtgatgtcactaagagtcgatgaagatgaatggattcattttaggtcctgtgagtaggtgaagtctctaggttctagattagtgtccaagagggtgttataaaggaacaaagccaggtcctactttgctccctaactctgcatgtgacatctctcttacatagacacgtttattagaagctgaggccagagccatattcatggctctccagaattacgcgctacagtaactttatacagccttgagtatcttgttgtagtagcacatggcagacaagacttgaggttaacccccagaagagccacggaaattgtgataactttcaaggtaaatgaagttttccagggtggttcagaagtccagccacaatctcaagccacacacaaacgggaatggggcatctggcaggggtggtgctaagattagaaaaagatggagccaagaaagtgaagcaaaactagactatgctcagcaagtagcactccttcttttctcaggaccccccctgttctgtctgggtgtctgtggagaagactgttcactggtggctgctttgttttttggtgctgttcttatgccactgttactcagtggatggccagccattctcacagaatacagtctgccacttgaatttctgcctattcttttcttccttactccatcttatgctcccgctaacggcctctggtatgtttcatgcagcagacagtgacacgctcatgctgttagagcatttgacattccaaaggaattttatcttgtttcatattgaagtctagcgataacccagaaataggggattccaacaattccgaacaggcttctttactgtcatagcatgtgattaatggttgttaatagactcatgtgatacttcttatagttggtttcacagggaaatatataaacacacacagagagacacacacacgtgtgtgtgtgtgtgtgtgtgtgtgtgtgtgtgtgtgtctgtgtgtctgtgtggtatgtgtgtgtgtgtgtgtgtgtgtgtgtctctgtggtgtgtgtgtgtgtgtgtgtgtgtgtgtactcactcacatgcacatatatgtggacagattctaaatactattcaaatccatacatttcagaaggtaacctttctccttgttttatggtagtgtttaaagaatcactcctctggaccaatttataattcattaataccagctctaatctctgagcagagttgtaaaggaatattagtgggatattatggctcttttccaggacatcattggcaaatggttcagcagactttgtgttatgcagaaggacacatgatggctttagagtctgttgctctaggactatatctctccttggaacagtaaaatttgaattttaccactagttttgtaactatcagtttagtataactgcctttgaatttaactcttagtccttcaaataatactattatagacaagacattctttttatttttgtgtgtggggggggtgagtatgtggtgtgagtgtgtttgagtgtgtgtgtgtgtgtgtgtgtgtgtgtgtgtgttaagtgtgtgtgaatgagtgtgtgttgctggattttctttgtccagccaggtccctctgcccttcagccccaaataaacacatggacgctgtcttaattataaaactgttggccaatgattaagtcttcttattggatagctctgtcttaattattaaccaatttctattaatccaagtatttccacctggtcttatcttcctggagaagggtccggacctgtgactcctttggcagcctacgggcagctctgtggtgggctccctctgcctgccttttccttgactcctagtccctcctttcttcctgcctcattggccaaacagtatttatttcattcatcaaccaataagagaaacatatgtacagaaggacctcctccatcatctgtgtgtgtatgagtgagtgtgtgtttgtgttcaggttcccacagaagctggaacatggcctatgagcccctcaagtttgagtttcgggcattaagagcagcccatgggtgctgggaactaattttgagttctctgcaagagacacacaggcttttcactgctgagccatctatccaccccaacaagatgttcttaaagagatccaaggaaacttatcatccctgagagcccctaaaggagccattagttatacattttcttcacaataataccaaagcattattgtattggtatttatacatattgcacaaaattaatgatgagtaaaatggctggagctgagcacaaaccaaggtactgacactaagtcatattagtaattatcccaaagccgcacattcacattcccagctaagggggaaaaacacctcatctacaagaattttcttgatgaaccaattaaaatgattggtgacataaaatgtcaatctctgagtaaagttcctttgtgtcagtacaacaaaacacgatgtaagcattaagcaagcctgacacataccaaacctaagagctctggtgcttccgaggccttcattgtttacttgaaagaatcactaatcaacaaactatagttttccaggcttggctgttggttagctattttctcagaaatcaaaacaatctattaaccaaagggatgtgacacagagtagttgatgctattggtaaaaacctgagattttatgtgataattagtattttggaacatttttattttgaaattagttctttttgctgtgacaaatgcccagtattttaaaggttttgggtattttgtttgtttgtttgtttgtttgtttgttttctgatagaatcagtggtgatgtcaccaaatgtcattttcaaatattccataatgaaatttatcaatactaggaaggctactaaattgagtgtagaaggaatattttttagcaacatgactttggtgatattaaggtctagtctgacttaccatggacatttttaatagacaaacaccacagctctattaatattaactcttcctataattctataacatataaccttcagtttatcctgggacaagctggggatgcctcaaccagtatgtcatccacacaaacatgaggacctgagttcatatccctaacacccacataaaaacctgggttttatatctgtaacctcggtgctgggaaacaggcaggcagatccctaaagcacgttgaccaccatgtctcaacactggtgagctccaggtttggtgagagatgttgagtcacagaacaaaaccagagaatgatgaagacacacacaggcacacaactgcactagcaatcaccacacacagacacacacagacacacacacaccacacacacacatacacacacatacatacatacatacacacacacatacacacacacagacacacacacatacaccacacacacacatacacacacacacagacacacacacacatacacacacacatacacacacagacacacacacacagacacacacacagacacacacacagacacacacacacacacacacacatatacacacacacacacacacacacacacacatacacacacacatacacacacacacacacacacacacacacacacacacacacacacacacacacacacacacacacacaactgccgtggaactcttttttactcagtaatgaaatacgatttcagcattcttagctgtgccccttggtggccaggtgagaggcagtgacaagcatgttgttttgaagcatgaattcccagcagaaaaactgtaaggacagacacttccatgtaccctattaaaaatttatcaggttaagaatgatattgttaacacttttctgctaaaaaattatttgtgtagatgtgcgtgccagtttctgtgtatgaatatatgtgtattgccagcttgtgtgtatgtgtgagtgtgtgtggtatgtgcgtgtgtgcagtacctgctgaggacagaagaggaatactagccatcttggtggctctgggtttgattgacagatcctgcctcaacgaataaggtgaaagagcaggcctccacctatttacagatatgtacaggtacaccaagacacacacgtactaaataacatgaagaaatccacatatacacacatatacatactacacacagacatataaaaatgaaagaaaaaagacctagactcacaaagacagaaccctttgtggggtagaatatgctaaatggccatctataaaccatattgtacacatcaccttcatctttgtaggatcatcctgaggtagaagttacccctgttaccactcatttagggcttgagcaagtcagaaaggttaagtcacccgatggaagacatggagagggtggggcacacctcattttagaagatctctcccctccaaatgcccttgaatcccctcctcactagctttccctcccatcttcatgggctctttttttaagccacggtgtccacttaaagctgcctgtatatgcatacatgtgcgaccatctccggggacatgtgtagcctcttaggagctgcatctctgaaggaaactgactctccccctcctagcggccatcaactaccaatagctcacctccatccacgcttgaactttaactggcttgaccttgggcttgtgcatgcaatccagcctctgtgagttcacaagatcatgtgtgtaatggcacaatcctgtccagaaaacacatagtggcactgatggaagcaaattgattttgctcttcaccctccttcagtcctacacccccgttttggtctcctccagttcttagtgtctataggtggcctctttctggctagctcccaacccccagttcccctagagatacccaggcatgaaacttgaccaagggttttttaaatctcctcagcgtctgccatattcatttcttaggatctttgtgtacatagattgtggtttgcaatgcagtggttacccttgcttctaaatcatttgggggctgagcccctggaagaggaacatgtgcgtgtcttgactcagaactccctagattgagttgtacgatgctcacactctacagttgaagacagcctggcttcatggagcctgtgattgcttccttctgggttagtctgcaggctagtttccgcgaaggctcccaagttgagtatttagaacacatggaagaggactggacacacccggagacaaggctgataagacagaggggcaatgtggccaaaaggcaaggtgtgccagggaattccagcaatttatagaactggaaaagggaaagaacagagtgtcgtctcacccctaaggtgagtgcagcctagtcaccccaccgatgtgggacctttatcccctttaactatgagaattaagctccggtctctttaaggaacactgtcacagtaagctaatgcattccttaaacctctgtggagctggcatgttgaggagttcactggccgccagtggatctacacacagcacctacagcttgtccaagagaacatcctacggcacacaacggaatgtctgcttatagggtggggacctgaacaaaactaattttcagatagtgctatggtgacatgccccctgccccagacatctcagccttctgcgcaggacttctggagccctgggaggtcaatggccaccacagctgatgggctgtggatattaagcgtggagaacagaagtgttgggaggtaagcggtgagcattttcataggcgcggctattgccaccctcaccgcctggcatctgccttcacttactcatccagttgacccagcagcagaggaagccaaggtctgtttacagaagagaaagtccagcactgtgattggagagccagggctctgggtgagtcacaccagactttccattctatgtcccatccctatccccgtgacactgacagtgaggaactggagttgatagagcttccatagatcacccacaaaaacaggtgtgataatgccaactttagaggtgggacatgtcctgtgtagtgactattgtcaactcaccacaacttgcttagctttcttcattatctctccaacgaagaaacagttgggtagacaagacagttaaatatagctaaaagagctaggaattctgggaaacattgctgccatattactccatctcacatatagcctggaacgttcctaggctatcttcatgaacaggtggtgaaggaaagcacagagagggggaaaggaagggatgagaaggaagaagaagagaacgagaaggaaaacctagcctatctgtcaccttatgaattctggaagctcctctccttcccaaaggaaggtagaaggtggcttgggagttctcaagtgtttttatttccccctttcctgcttgtttcgggttacttcatgtactcatgaccccctggggtctctgagatatttaagcaacttgacagaagacagagattgacatcccattgctcccccctcagctgcatcatctggaccatagctaaggtgttctatttcttttaagccaagaaaagacctggctcttatctaaggtctgacattattacccacaccccctgtcggtcacctactctgccacactccctccctcgtggaatgagaaatatggctgcccttgctcacctcataaagtcaccgaggggtctaacagaaaattgtgtcacctgcaaagctagactcctatgaaaacctgtaatgatgcattcttactacagtgtgaaggaccgatattagttcctccatccaagcaatgaaaaaagtaaaatattaaccccaaaaagtaagagaaattggagcagattgaggatattagagggacatgtctcagtcttgctataacttgtggatcactcctgcctgaatctaatgtggttggttccctgcacttttccactctgtgttctcgtgttaacttcagattctggaatccatagagtgctcctcacttcccccaccaacacgtttgtcatccctggggacatctttccttctccaaatatgtacaaaaccagcatccccaaagctgactgtgggctggctgagctcaaggctattctggggcagccggtttgcacgcttgctagaggaggattaatgagccagtctgctcatccattgcaattagaaacaacaccacaactattctgacgctatttctatgcagggagcttgaactgctcatcagccctcctcactcagagacccgtgggtaattagggccctggtaaatataggagacctgaaggagagcagccccatctttgcagacagccccagatggcacccaacctgcagaagcagagctgaaagtgccctggcctttttaaccaccatgggctgggctgtcacaggcaatttaggagcaagagtccatcaatcttaggaaagcacccccacattcatgggcccagatccaccaagtcacaggtttgacaccagcgcattaaaaggatgattctgatttttagctaaggccacaggggtgggggtactgtgctcctgcatctcttctacttgaacaagaacaaggtaacaaagaaaaagaggaaggagtggggttgggagtgcgggaatgggtgatgatcacagagctttgactgggcccttggctggttagggaagttcctctctgtcctctgacaaggtcctcttaaacaagcagaccacagcactctggtttgagaatactatgcaattcataacttgtttcctcctgttgctgggggcttggagggaatgagtactgctagctgtgcattccagattttcttacagtctcttctttccagaaattgggaggtgactagtgaggttaggtacagagtccagagcccccaacaggtgctagggagacgtccggagttcctctgatctcatttcctctgtgacatgtgtgttctctgagacctgcctgagaatgtggcagaaatgtggggactcaggcctagtttactgagtgtgggggggggggggggatgtcccctggcaatctgtagacacatccaggtggaggagtgccctgcaggaggctgattgctgagtacctgagagtggagaccagcattattggttaagattcaccagtgtgagtcaggagagagggggcccagctgtgccttgtgaggttaaggggaggggaggtccagctgtgccttgttaggttaaggggagggggtccagctgtgccttgtgaggttgaggggaggggaggtccagctgtgccttgtgaggttgaggggaggggaggtccagctgtgccttgtgaggttatggggagggggtatagctgtgtcttgtgaggttatggggaggtggcccagctcagctctgctgtttggattccttatttgggattttccattcatgatgatgaaaagctgatcactcacttcctgggctcctaggataatgggagaaactgaggtctgggtgtccattctggaagagcctgattgcctgcagcttcacctctgagtattgtcctccgtgtgtgcactttgggtacttgggtgaggttttttggccaaatgctgtccatctttcgaattgtgcttacagggtctgaaccccgggggctcttctcccctgcttggtttaggagattcagttatcttcgtggatactgtggttagtgttgttctagggggacgtcatccacttacgacaggtcagtgctcttcctcaagagagggacatggctcactgtacccccagaagtatctgcctcatcccatctgataagcaggcaagcttctagacatgctgcttcccttagttttgtcaaacctctgtgcagtgacaggccattcttgtcagaagtggatttttggtggaaactggctcccattgagaaaggaaaaaagtcacttgttttctgggtatttgggggacctgctggcatgaaggccactctcaaggcttgaagcactaggacaagtgtcagagctcagactttctgaagcccagatgttgagtcaggcccagggatttcattttggaaaagccatgtgggtgttaattatctgaattctttatatttttaccatgtcatgaaggtaggtaatggcagtcacccaggaaacatgctctgtcaactgcaaagtgcccagagatggcagacactgtatattaccccagtggcaccattccatgagcaattttactgactgctatccctgaagggaatagtacttctagctttcctgtgccctagggctggtgaggaaggcagagctaacataagtaatgaaagaattgcacggttaacattgcggtctgaacaataatgaaaatgtataggatgctacatgaagtgattactgttaaaaccacttttcaaaacccaaagtaccagttcccatgactgatggtaaactattagcctttgctagctcaaaaatctctagaatatttagcaatcatctctcttcagtcaatctgagccccactccagcacaccactgggtcacatggaatatcagagtacgtccaaacagacttatggcttccagagtattcctgatgtagtaacacctaaactgagcctgccagacagagcatctctagctgtcaaggtaaagatcaaatgtaggattcttttcagtcaagagattagcctatgcaaagactctgggggcaagaagaaaattgatgcaggatgtgaagggatagagtttagggaggctttgtgtgcctccagtcaaagaatgagcctctcattgttatcgtcatctgaggcttgaggaactcaggcagcagaaagacagagcaaaggagaaggccatagatctgaatccaggtctttctccaaacttgccagtatatactttctgctgcacttctgttgaaaccagaagagaaggcaagaaccaaacatgccatggatgagtgaaatttgggctgtagttctaggaatagcacaaatttcacgtctcagggcatatctcgggacaggcgattccctagctagttgatttagaggacattgggaaattcgatgagacgtgtagactccctcgttgtaaggaccatgcttgaacatgtgcagatttgcacgtaggatctggaggctcaatgaaagcctgaagctggattgtagcctctgtgattgaaaagctttaggggaacagcccccccctggttgcagcttccctgctgctgtctctctcctgcgtggtcgtggactgtctctgtgaggggatgatcctcaccctctgtctgccatcttactagacgtcttttagcttctctcattatcactataacaagagatttttgtcttttattggagtcccagggccatgtcatttaaaatacctcttacaagggtgttgggctagaatgaggagctggtgatttccattagcctgatccctgaaaactttgtcccctgtgtctctagccactatgcgacactccattaacacctatttttagtgctccccttgaagacccatgcccttggacatcctttatcaaaaagcgtgtcattaaaacattcccaaacctttcagcaattcaaattccaataaatccattcaacgtgtgctacgttatcccctgagtaaatgtccactctactaaatttcatgagtccaaccccagtgtccttgctcttccttgtttgcaaacgcttttgaatttaaaggaggcatttgtgaaagtgttataaaccctttggaagtaaagagtcattaaaatcgagagcctacagtcccgactgcaattatttgacttcatttctagtactgtggcccactcacttccaacccttccttgtggaacaaggaagcacaggtttccattaagacagagttctgccttctccacagtctcatgtgctctatgagagctgttccgttcagtcacacataaatacatcagcccacgacagctcacagaacttctgagagctaatagttaactattctggaattttgtgagctgacaactatggcagaggagacactaatgggggaaagatgatctcataagccagtaataaaataaagagcaatatgaccatcaaggaacagcgctggaggtgataggcagagcatgccctgcggaaccatgcagcctaatacacagtttgggactctgtgggctcccctcacaagggtatggtctgcctctgcagtgggctacagctacataaaaatgaagtaagtgtttgttgaatggataaatcctaaggcatttggaaacaaatcacacccaggagaattctagtcactcacattcagattaaggtaaataatgtatcccagaagattttcatatatatatgaatatatattgaactttggttaacttatagatggagtctcatgttcttccctttgaaactctaccctgatctctttttggatgactggccacttgaacttctgcccaatggcccacccatgagtcagaagtatctgtgagggttgatgattgtctcactaagtttcatcttggagaagtgacatttgtccaactcctagttctgtattagtcacttgctacatactttgctcatatgagctcattagctcacttcatctcccaaaaatgtgatgtaggcaaataagactcagaggagtgaaatgacttggcaaatgatacctaatattcatgacttgagtttctgttattcaagaaaaaaaaaagtgtggtatttaatcttccaggattcttcagagggcacttacccagaggcaaaacccttgctatcacaggatgaatgtgataatgaagaaaagatgattttcatgcctcactttgaactcagatttatctactctcgagtcaagaaaaacaattacaatttaatcattttgtgaagcaatcatcatactaatatgtatgcccatagagtgctcagaagcttcatgagcaaaacttcaattttattttagtaccaaacctaagtggcttaagcacatctcccatctgcctccctttcagtaacaacaagcacatgtctaagttgctgaaagcacactggccagctgaaggtgtgggatgagcaagaaactgaagagccctcgggcctaggctgtagatgtagaaaaccaatcctcagactagagactctttggaggtggattgggcttcagcaagttgaattctttcaagaagaaagaaggatgaggaagaggaggaggaggagggaaggaaggaagaaaggaagaaaggaagaaagaaagaaagaaagaaagaaagaaagaaggaaggaaggaaagaaagaaggaaggaaagaaagaaaaaaggaggcaagagaaaaagactaaaggattcagagtgctgctattaagaaatagcgcccatgagttgaccaagaaggaagaccggaagatgaaatgagcttcctccacaatgtaggagtgattccccacagactttgctgaaccagctttctccgggactgagaagcagggcagagagcgcggagggcttcgtgacctccaccagccgcaagtcctctagcccagagacacatgtttacccatttttgtaccacttcccattcctgagacaatgaagtgtgttttctaagtgatagaatcggattccctgaggactttctctagccattgtgccttccctctaagaaaactggaagtatatgggattgacatgccctcagctactcaaggaaccttgatctagtgtccaatgggagttgatgagcaaatgcaccgggcctcatcccatgaggataattctttcatgttctacattagaagcaagatcttattttttgtttacctattcctttccctaaatcttgacctcagtcttcctctaccttggcagttttattggatcattttgtccactgattcttttaaaatccctgccttgagttctgcttcagaaaaaaagagagagaaagaaaagaaaaactgaagtttagtgccaccattacacaatgggctattgagaaatgagacacctgccgggtgttggtggcgcacgcctttaatcccagcactcgggaggcagaggcaggtgggtctctgtgagttgaggccagcctggtctccagagggagtgccaggataggctccaaagctacacagagaaaacctctctcgaaaaaccaaaaagaaaaagaaaaaaagagagagaaagaaagaaaagaaaggaaaagaaaagaaaggaaaggaaaggaaaggaaaggaaaggaaaagaaaagaaaagaaaagataagaaaaagaaagaaatgagacaccctatagaagatgtatctaaaagttcatgctgggaaggcacatgggacagccatgccccagtgatggcaagagaccagtccacataccaatgacaaatctctactttggtccccaagtccttgggcataacacactatatagagaaggtatagattcatataacgatctttgtgttttatcttcaggtgcagtcaggcttctctttgaaatagagcaaggcaaagagagaaaagatgtccagagacttggccatgagttatggagtatcaagtacctctcagatcagtaactttaaaaatcttgtatgctgttgaagtatggttttggtgaaccaaacagtgggtggtgtgcacccactgggagctggcaccccatcaatcgtcagcagatgcaacttgcctcttgtgacctttacccttatcctcagggtgtggtttggggcaaaaagaacagttcaactttagctttaaattacaacactatttgaagcaatatttagaggaagctgatgtcattggctgatttactgtcattccaaaagccgtgccccctgtaaactattttccacacactggtttggttgtgcaaagctacagtggattaaacatgtttgcaagtttctgggctgctctttttgttgagagatggaacccaattggcctccccttgaagttgtgcttgagtttgtgatttatttaataacagaattttgcagaagtgatctgagacatccgtgtttacatgattttagaagctttgcaactttcatctccatcacttggaaagcccatgtcttgagaaagccctagctcccttgaagagaagagccgaggtatttagtagacaaccttggctaaattcccagtcagttaaagcaaggcattggaaaaatgttctccagccccaacaagctgcctcagttcttactctgatgagtttatggcctgtaatggcctgtcggttgaacatgcttgaaccaaattaatgaacaaacccaacaatttgaattcttttaagtcactaggttttgacatagtttgttatgacatcacaagttacaaaggtcataaacacaagtgcaatattgaactcctaaaggattgtaggcattagtgacagtaacagagaccaaaacaaaatgcaaagatgtgattccttccatgttccccttatttcagctattagtcctatgcagaagacagctgaatttggaaggattttaaagatgtctttcagttgttggctcctattacagatgctgctccaagtgtggtttgattgttggggccactcagcatgactcttgtaatctgtaagtgcccactgatatggcaattgcatatttttctgttgtataattgttaagaaagaataggaattagcaagttatagcacatagaccaaatccagatggctgtattgttaaaataaagttcttttagaatagttccattcattcttctgcatattgtctgtgactaccattgtgctacaactccagagtatttccatagccaccctatagccttcaaatgctaaattacttattacctccttatacagaatgtttttggagctctatttaaggccatcagaagcaatttaccttcatagtaagtgttacagttactattactagcctaccttaggcctatttcaacttgatagccctatgtcataatctactacataggggccttagtcgtgtatctatttccttagtcaccatgcaaggaggtaacggtagtgactgtacctggtgacaaggatgaaataatgaatatagataagcttctggcatacagcagggattgtcatagaccatgggtacctgagtcacctcttattcaatgagcttaacttggttctcacctatcttctatatgataatgaaaaggttgggaaatgcaacctaaaaacattcaatggcccacaatgagtgaacgtatcgaaatctagtggttttaagaatgataggcaatgaatttctaccatttctacctctaccacagagaagggagcatgaagggcctttttagatttaggagagagcatccacttactgagatgcaaggtcatcagttttgagtaaaatccagaagatggagtctctactgtggctcaaggttaccatgtttgatgtttttataccttgatccagtagatctgatgacactaaaaatctctatatgaaacaccaatcctctacagagccattttcccttaagtgaatcacagaatagatgtcagaatagatattcagaattcaggaccagcaccatgatagctgtttcagaaaatctatccttccttacatagcagtatggtactggagacttgattggggaccatgaagctacaacacaacctgaatttccagttatgagctaagcattgttgagccgagcatgtatctacataaagcatgaataatagtagttcatcatcaatgggcatggaatacacacaaattaataagcactgacccatgcacccatagttctgctccagtaaattttggaatctatatctatggagtcatgggaagttattggtaaagagtccttgaaaaacaaattgaccttgtttaaagaaatctttgtataatagcttgtcatccaaagtgaaaaggctacatcattgtatctctaccttatggtgattcagaaaggtaaataacagaaaaatgtccctgtgggtagaatttccatcagtgaatctcactgctgatttttttctttcctgagaggagatagaagcaaagatatgaagctacattgcttcatgggcagtaattgacagttctggtagcttactagaggtgttgaacaaagatgttgaggtaaacaaaattggaaacgggaaaaattaaagggatcaacttctagggttgagtaaaagtacatctggaatgctagagtgtctcttggactgttgtgccttataattgcttttgttactataataaaataaatggaaaataatctcagttgtcaatgtctgggcccttcagaagacaaggagtcatgatgaagggtgttcttgctgaggacaaagggatgagcaatgaagcagggaggttataaataccatgacaacaaactcagccgagacaggaactgcctttcctggaaatcccttgccagtgtcacactgggtcaaggagtcttagaagaaatttgcatcaagttggggaagaagcaaagaaaagttgccaccatactctagaggagggtacctgggagaattatagtgagcatgtattttccttgacccttgactctgtgacaacttggcttagcagaagccatggtttcagctcctatgctctctcctggtctcctccttcaccatctccagcatatgctaggtgttcacgtgtagcaaaaagcactaggtccttcaagcatcccacatcaaggtggatagataaagggctggtgtgcatcctagtttgcctttgggatttcatctttgcacccctctatttcatgtctagtgtttctctctcatggtgtgaccgatagagacttcaggacacagcacagagaagcaaaactctgtcgtgagtcttccaatgtttctgattatttcacaccactgatggaggtaaccacagagacagaagtcaggaaccattgacagtattgctgccattccctaccacctccgaagggcagctgtaggggaagctgtagccacaccttcttaggggctggctacaggagtacctgagcaggcttgtgagggcgtggtcagagtgaggagggggtctgtgttttggtttcgttttctctttgcttcttgctgtacatactaccaccggctggctggttcgctctgtaagtaaggcttttccctattaaatacccttatatttctacctgactccataatggtaatttcctaccatatctggttgtcggaagcgggatattggaaacccacaccccatttgggacaggctgtgggttccatcgggcccgcggcctaggcccagaaagcgccctctctccacaggcgttcccggctagcagcttcccctacaggcagctcttctacaagtgggtaaagctgggggcactgtgattcctgaatattttatgactcatccttttcagtaccagagcttccatgttttctactgtgccctgtcccagaatgcacctacaacaaatgccagatcagacagtagaacatcctagatttaagattaaaaaatattatcacatatgtccatgtagttcatgtccaagatccagttcacaaataaggtgaaggctaagactgcttgatctgcccatcgggctcaccaggcttacccctcagaagaccccgagaaatcggagctctcctaactttcagagtatgatttgggtcttaattccacattactgctctaccttcgctttttctcctgtttcttgtctctttatcttttcaggggtcatctctcatttgctgtcaacatggcatcatggggtcttacgaactatttatcctctatgttgttttgcaaacaccttccaggcagcttcctgcctcactctccaccggcctaccttggtccgaatgtagctagcaggcctccttctgtgaactgtgctgtatagcatgactggtcctccctgactggaaaagtgtctgtcggcaactgaaatctgcatggaggatctgtctggagctgctctgttcacaccaaggtaatgaaacctgctcaaccttcctaagtcattagatagatcatggattcattctatgaaatcgttgtattctctccgttgagccacagaccttgagagtcatgcacgaggaggctagagactgctttctcagaagacgaaatcatttcccaactccaccctgaaagtcccaggcagctattgagacccagaatgcgggggatctgctgtcccgtgcaatggcagggctgctccactgtattcatgaagtgattaacattccccatgaaggaatggaggctgagtgactcagagcagattaggagaaaagacctgagtccttctcagaatccttggtatgctgtttggcagggttcctgtctgcctccaggcagactgcctcccaagaccctaaatttccaaacacatacatcatgtccactgtccacgtaggtattgattcttccccttcctttgcaggagaaatgatcaaaaaaaggcagagagaaagaagaggaaggggaggggggagggaggagagagagagagggagagagagagagagagagagagagagagagagagaatcatatccttataccagaactttaacatttagacttagaaatgggcctgccacattgttgtttctaagtcaccgtggatcagaagcaaactcagcatgctctagttgacagtaaaaacaaaacaaaacaacaacaaaaaatccctgttgacagtacagaaacattagagacttactttttgcctacttcatactttacattagaccaaaataactgcagctagctctcaggtaattcctgttatgtcccaacttccacttttctaatgaaagaaatatttaaatgactcttggcagacaagctatttgaaaacagaaagcaatgtcaaaatatttctggtgtaacatttgtaagcaaatgttcacaaacatttttatctcaaatgcagtcacatagagccagacacgctggaatttccagtgctcactcacgccgagcaagctttggagcacggcaggtcttcccggtagctaagcccctctagataacacgctctaataaaagggagaaagcactgggattacattccctttccatcgcactgccaactgtctgtgcgttgaagacccgcatcgtcaccaccgaggtgcacacaaagagcagagttccagtgactgggacaaatgggaagggcacagcttaacaacttgtacttgacacggtgaatgtccctaaaaactgccaagtgagctagtggcaaccggggtgggactgacatctacatccagctgccagggagatgactgtattctaaatccttagtttggcagtgattttgttatcatgtctgatgggagcccctcaagtctgtaaaacctctgtcctgccggaagagggctggaggcagcagaaagggtcatggcgctaggattcttagccaccatgatcattctccctgctttacacccccatatccatctccctatatgaaaacccgtgcttcctttataactacgttacgtgtacaataccagaagcaagagaagcatgagcctaaccagacaagagaggggagaagtgcaaagaatgacacacccccaaacgacttccatgtatagaatgaaaataagtctttacacatcaacaaaacacagcaagaattttttttttgcgaaaaatatttttaaataaagttttgtcttttttttttttttttttacattctgatatacatatgtaacaaggtttatggcactgtaaccagaatcaaatcaaagaaaaaaagaagaggaaagaaagaaaaggaaaagagggagaggggtgggagggaaagccactggtattgttgaatttctatctccaagctcagctgccagttctaactcacccacacactcaaaacaccatttttattgcacaagtgccagaaaaggcacatggtataaaggtcaatttctttctattaaaaaaaaaaatctttcaaacccagagaaagggaaaaactatccagagcatgaaacacacaaaaccaacaataccctctgtctcttcagagagtgcaggaagtgatctgagaccactgagctgcccgcccttctcttcgcatcagtgagcacaacagggcatggcttggcggggtttgttttctacatggttggccaggaggttccaggtcttcgagagtcaatgtcttttgcacctccttttggttctttgtaactgaagtgtggtatcttcggtctatgagcccgcacagacagacgatttagtcacaaactctacaacggctaacaaggaaaactggggagaaacaagtttcataatatttttatttgttgactttaaaaaatgacctctttaacctccttgcaataccagatcaagataagtgaatctcattggcatcagaagttatagtctcctcacacttattaaaaatagagtctttagacaagttcgtttcctttcacaaacattctcccaacttaacaaaaaaaaaaacaaaaaaaacaaaaaacaaaaacaaaaccagaccccccccttcactccagttcatctccgaacacagccagggccccttccattgtgcctgctgtcacacaaccgtctccatgcccatcagctttggtgtaaggatccgtggtgtcacaccattgtttaggtcttcctcaaattccagcaactgccccatgaagttgaggtttggggaaataattggtcgtttgcctttgacgaatttgtaagcatcagtcatggtcatccgcgtgtgcttcatcaagtaggcgatgacgatggtggcagaacgggacacgcccgcctggcagtgaatgaggaggcccttgccacactgatgcgcttcctctgtgggacagacagacagacaggtggtgagggggaggagaaggagaggcttcctttcgtacagaaagaatggactcagatggttccagagtatatgtaccagagcattctacatgctcaagtcacgagctacagagctggctgcaagcaggagctgccggtctgcatgttcttaaattattaaaaaaaaaaaaaaaagtctgggaggatacacatgccacagtgcacatggggaggtcaaaggacaacctgaaggggtcacttctctctttccacaataccagtttgtagggattgaatgtgggttgtcactcttggcagcaagcaccttttaccgctaagccatgtcactgaccctccttttttctttttggtgtgtgtgtgtgtgtgtgtgtgtgtgtgtgtgtgtgtgtgtgtggtacatgtgtggtacatgtgactgtaggtgcatgtttgcatatgtgtgaatgattgtgtctctggaaggccatggttgatgtccatgctatatgatgcagcatctcttgctgaacctggacctcacttcttctgctggtccaggtagccagtttgctctggggtccccatcacagtccctcatgccatgggattccaggcaggctactgcagctacacggcccatatgtggggctctggtgatctgagcccccaccctcatgtttgcgtggtaagtgcagaacctgctgagccatcaacagttgtacatccagagagaagatggagcaagggagtcatctgtgggagcagcacacatcacagaggatggacacactgacacactcatgaataggaagctactaagccagccatactgacaacaggacacacagacacactcatgaataggaagctactaagccagccatactgacaacaggacacacagacacactcatgaataggaagctactaaagccagccatactgacaacaggacacacggacacactcatgaataggaagctactaagctacacagacacactcatgatcaagcaagccactaagttagccatactgacaacgggacacacggacacactcatgacaagcaagctactacactcaacataaatgttactgaatctctctttcccaactatcttgttccttttctatttcctctaaaatcataccactgacaaaaaaggaaggaaaataaggacaacagagaaactggaaattatatcacatacataaatgtgcatatattataaaattcttctgattaacaatattaattccattttccaggttatatgatcatatgactgaaaaactagtgctattagcaatgtgtagtctacacgctagacacacacacccctacctttctttatgctatagaagactgttctctctaagagctaccatttagtgcataaggtttactaaatctccatggaagggaaggaatgaagctcaaccagaaagttcctacacccagcttctcaccagagaccccaactgttgtcaaaattagacttgtagaggactgacctctctcacgcatttaacccctcacccccacatacacggttcctacattgccatcatttgggaggcagaactcccaagtatgttagaaccgagaacaacagaaagtggcatgtctaatactaaaagctttggatgcctgtcagcactggacaacattttagtgacacttctagactaaaacacatccccaaggaggagtccctggaggaatgcaggtcagtgacgaggtagaagagaactgggtaaagatttatccctttgctttaaatcatctgctaactagtagaccaagagacaaacatgatgtaaatctcattctcaccaaccactagacaagtttgtatcaagagaccccagagcaatgcttcaagaaaatctccccttgtcagcttctcttcagcagacgctaaatgacctcccaaaccaagaacatcaaacatggtggcaagagaacgatcaaggtgcaccatgggtttgaccacctgttccactaacaccctagctgagtgaccctgtgagtgtgctgacctcccaggacctcggtcttcctgcttggataatgcaaaggacacgagctcaccagcctctggaactgtggaaagggagtcatttgattcagcggttacactggcattgttaagccctaaacctgggcattgcttagtttatattaaactagggtgaatgttagtatgctgtgcaccctgctgtgtttcccttgaggccacactgtaaaatttcagttgatccaatcagaggacaaggagaacaaagtgagcccaaacacgtgatcctgaattgttctgcaggctaaatgttgcttgttattagttttgttttcttctaaaggagcaggtaaatctgaataatccagaaggaatgtgagcaccatggctgtaatcttagaacaagcccatcccatgctattagctaaatggaaaacaatttcccaacttcctccacctggaattaggtcaggtggactctcctttctaacagcctctgttgaccaggaacttccttgtctacctggtgacaagcatttcctactcaggatccaggcttggcttgggttttatgaataaaggatccagggcatctttacccagtgcttggaactaattaacacagcatgggcccagagtattggcttaggagtcctggctaagagtctagactactaggacactaggtcctttgtttttattttttattctcattctctctctcctgcctttctctcccctctctttccctccaccaccctcccccgcccccccccccgcccgtctctgtacaggtataggcataccacagcacacaagcggaagtcaatatgggtgcttgcctaccaccttctttgagataggatttcttgtgccactgtggacaccaagctagctatcctgtacatggctaggggttgtccacctccatcttgctataggcgagaaggcattacagatgtgtactccagcatctgactttccttgggttctgggggactcagactcaggtcttcactctcatgagtaaacacttttcctcgacgtgccttctcctcaacccccagttcccttctgacactaggattcctgacacggacaggtcaccttacttctgagtctagagaacactggctatccttccagagtgcccatggtagggcccagcactgccggacaaactggaagggaaaacaggcaagcaagtgtccagagctgccagtatgccaacagatccatcaccctggcagatgctaaacttgagactctttttctgtcaaaacagcaacaaccatgactcagtgtagctcacagtactgaatggaaatcacttgccctatgctgggtcaataaagctggtggtatggaggtttggggacagttaaaggtgatatcagtctctatttggtgtgtccttcagcgctgggggcggcaccacacagactaggcagcaggaccagctctgactagttcctcatgttccccttcatccttctggtcattcagtagctaacatccagcatccaccgtagctgctttgttatcgggaggatagataggaacttgtggttgaacaggtgtgagacaaagacagtgcctgtgtctttagtttgaatatgaaacggctccagacctgtgtcaaatgcttggtctccagctggtggtactgcttccaaaggtctctaaaactttagagggggactctggccttgggaagtaggtcacacactacttccaagtgtcactgaaggcgatatgttgtcctggcccctcccttcctagtcaccatgaattcagcagtcttgatcatacacatccactgccatgttctgtcccaccacaggcccagaatcaacaaggccaaggcctgaagcctctgagatcataagccaagataattgctcccttcaggtcagcctctcaggtatttcagccatggaaatggaaatctcgctaattcaactattcttttatatccatccagatagttccgagacctaaaggaaggactatggtttgtctgtcttcccctaacttaggaataaaccttgggccttatatcaaacccagagccggagggaagggagagctgccccacccccgggagctagttaccaatgaactcaaaggcctcttcgaagtactgccgcaggttctgcttgttgctatcagtggcaggcagcctcttgtagttgaagaggcctttctcgtagtggtacagcgggagatgagtggtgacgttcatgacgtagccgatgttgagcctctgcatggtgtctaggtcctgagcatcctgctcgttgccaaggaacaggaagggcaggatgggcgtcagctctgcgttctcgatgtcaggggtggtggggacagactgaggtagcatgctcgaggccgcagatgcgccgccccccacctcacggcactcttggagctggagggagttgtcacagaggttttcatggttctgtttaaaactactgagtccccctggaaggaaaacatacaaagcacgtgtttagaagatgacagagcccacggaaaatggcagcttccccataaagatgagtgccactgtggctatgcacatttttaacattcctaaaataaaaacagaaaccagaagtgtattttgacactcagagccagattcagagggcttgcactccttattgcacaaactgggccaaggtgcctgggaacaagcgccacccagcacccagcaatttcatcaactgcaaatttgatttgcttctaacagacttaaggtccctgacctctgtagagcagtgtactttaggggctgagaaaagcaggctggcactgtcgtgcagacagcttctgcttgtgccctggtgtcgtgcgcacacgtcctgcgccatttataactcaccttaccaaaagccaagttcactccctaggcggccgagcagttgcaaacaggccctgtggaaaggccaggctgtgctggctgttgtcctactatcaccgctgacctgcctgctgagttgcacaagctcatttctttctctctgtgtgtctcagtaaccccacgagtgtacagggtgagtcccagatggggataaacacaggtcaagtgttcagcataccctctacccccaggcttgcatggtccctctatggacaagctattcctattcatcttatttctatggctgcccaaaggtggaaacagcagagggaaacttgggccagggaagtcacccctgggagagagtcagaatctacatgaccgtccacacaggtccttgatgtttgcacattttgacatccaggagagtggcatctgtgaatggccccttttccagtacctagcttttagaggattacaagcacactaacccccctcatggtgacctctgacctctgctgggtctgctaatgcacactctgagcttgaggctctgctctaactccaaagctgaggcggaatcacttcaaaggcctagctgcacctgtttccccacgttcagcatgcaaaagggcctggtgttagtacagacacttatggaaatcacacagccacaggcgtgtgattagatccatggagatgttcacacaataccatctgcttaagggtggaagcagagatctggctccaacacacacacacacacacacacacacacacacacacacacgtaaacatacacacaataatagtaagttagaaaaagaaaaggctaagtaaataccgaaataaaacttaataattgaattcatccatggaatattatgtacccattaaaggaataactatgcaaagaatataaaaaacatcaaagagaatgcttctgtttaatattaagaaacagctaattcaaaacattctgaaaaaaaaaaaaagcctaaagcgtatacataaaaagaattaaggaaatttatgggtcagagtttgtcacttaattttccctttcttatgttacacacaattacacacagacaaacctgaatgattatgaggctcaaattctacaaggtacacgagagacagtaagagacctggggatggatggggtcatccagtgagcatgtgtgccagtagagcaggatgggactcaaggcttctggggaaagggaagttcccggaagtaatgtcctgccagtcacagagtctgatagctcccaggcatgaggccgaaagcacaaaccctgaataggacatatgtctgtgctaacagaagggcaggaagtccatttgcccaccagatacttaactgacgccactttcttcctcatttcgtctcattttttcttttgaccactagagcaggggacctgaacagagcataaccccaagcgatgggcacagccaggtgtatgtcagaacacaggtcatattttcagtaggaaatggcgacgatccacagacaagtcaggacagacaagcctgtgctcagactatcagtcaaaaaggagaaaagtaaatgaaaactgtttggaggagcgcacatacattcatttgacttagtttctgtaattaaactctgtccttactgttatcttctgttgtgaaatcactatactcgggtgactagcccagagggaacccttccaaccacaagacacgaaaaaaacatcaccaatgaatgtataaaaactacccaccacttctgccccaaactccagaggacactgggaggaaagatcttgaaatctgctgggctccacaaatcccccagtaaagagccccatgctgatcctgccaggggaacctaattcactttttttttttccttaagaaaaaggcacttgtaacattttccatataagttgagaggaaggactggggaactaaactcaaaaggcgaggctgggaggtgggaaggcgggctctcactcttatttagtgtattcaagctgtaatttgtcttaaaagcagctagttagaaaaaaaaataaaaataaaagcataccaaccccctcccactcccacacacacaaaaaaatacccagcatagagctttttaaaattcagtctctgcccctcctttcccagtgacatcagccggaggctccccacctgcccagttgccatagcagtcacacaaagacacacaatgacatcagttggcatgatatcagctctttgaatgcaaacaatacaagaagaactactttgtttaaggcctcgggtacaactgtgctctgaggagccaatgacgtaatgctaacaggtggcaaggggccttccatttgcctaatggggaaaaacacgggggaggggtaggtcagagggagtctgagacccacacacagaaggcttcttccacccatagggtgttgtgcgcctgtgtgaaacgatgtgtgttgtgtgtgagagacaaatgggaaagacgcctgtgcactctctgtagggagaaaaggggggaaaggccatgtgactcaaacaactcaggggacaaggaagtaagttctctctgagggtctgaagagggcctccagcttaagtctgctcgtgccaggcgcccgtcctcacaacagcttgatgtgccagcaggtgctgaagtggggactctctcctggatggcctttcagaccttgggaaacagtcctacctcactggggtgtttctcagaaatctccatggaggctgtttgtgcctcttaggggtaagagtggcgatgggatgggtttggggttggtagcagcaggggaagagaacagaacagttaaggaggccatttttggccctctgaccccatcaaatgattacttagtatgtttggcgtgactatgtaagagctacaaggggctgggaagacagttcagtcatgtaaagggcctgctgtacaagtattaggatctggggctggatccccaacacccctgtgaaggcaaggaacaaggtgtctgtaaccctcccaccccgcactggggagaagacagggagagcccttgtacctcatgcatgcgcacacacacacacacacacacacacacacacaaagaaaagcatcactaacacactgtaggagaggagcgagtatggtggatggagacacatgggccaagcctagggtgaggactcagccttctaggaacttgtgtgaacccctttccctggggaaggctcagtttactgtgacccagacataatatagcctattcacggtgctgaggtagaggacacctgtgtgaagggtttatggctacagcacatggcatttaatacatcctatcttattatgcccacaccgtcagcatggacctacaaccacctacactcaatctggtcatgagatgatgatgctggaatcagagcctaccctgccaaagcccagttatgagatcctaggcacgttcctcatctgtttcttcctccttccccctaccaaagactgagataatagtagtgcctacctcgatattattctaagaacaaaatacgttaacaaatatacagtttgttgaaatcatatggggtatgtgatgaatacttcattccttactagaaataaaatctaatgtcttatgaaagctctgacaagcgaacatcctggaattttcacattttgatatttatttatttatttgatatttctctgtagatctggcttagtgctgtgtcgatcaaggtggcctcaaactcatggcaatcctcctgcctcaggttccatcctgagctctgcaccatcatgtccagcttaaatttttatttatgaaataactaggagccaacttatctgaggagttttaaagtctgagtaacataattctatcttaaacaggtcatgtttttcctgagcaacagttctgattttctttcccctgaattagcttccccaatagtcttgggattcctatttttgccatgaactgggcttttaagaaatgaaatagtttttacccatttccccagtcccccactccaaactgggtagacttccttcacacaaatagctcgaggttattaatgctaatattcttgagacatgcactacatatcgaagaacaagcattttcaaaccttgtctcagaatggggtgcccttgactttgagtccatgaatttgaaaaggtgataagaaaatgctcagcacctcaaaagaaaagtacttctatgtgccacctgctatgaccaggtgtgttccggggcagctcaggatggtgacagactcacactttggtggtaaaactatcttttgtagccccacttgggcttctgttgttcgctactgcagtaccttctgtatgtggtgtgactctctgacagcagggctaaagaaccaatgctcacactgggaatccataagcaggagaaagccatgctctacagaatagtcagagcgaggcttagccagaaattgaaggagaacaatgcctgaaggtcaacatatagaattagtgtttacagaagggtaccgggtgctgatctaaacacaggactctttctgtttggggtaaggatattggcgactcctattggcagctttgctttgcttactgtggtccctgtcagggcattgatggcagtgaagatcagagattggatgaaacaagtctggattaaaacgggattttagccctaaccatctgcatagcggattatttaacacacctgcatctcagttcccacatcagtaatttggacatacccatcccaaagatctccagcagacataatacttactacataacacatcttacagacgacagaagtattggcacacaataaatactttgtagacccccggtggaaacaataacacaccagggcagtctcctaaacgtctgtaggcacaagataagatgaaagaataaagctgagctggtgtcaagcgtctaaggcagaaatgtccagagatgggggcagagcacatctcacccactttagtatgagagatacatggagctccaggtatcgcgataaaaaggactcttacttttcattttctacgaacttattcacatactccacaggtgagcttggctatttgacagcaccagtgtttttaagttcaataccaggaggcatcagttaagctattttatgatcctagcctgtggaaagctacacttctttcccaagagtgaaaggaagctaccctggggagagcggaggggagggagggtgctgtctcctgagcataagggatgaaacagagacagagagaaacaggaatggagggacaggggcctgagtccatagctttcttgcacatagaccattggtggcttcttcaaaccagtgcgaccgccttcactgtgaaatgcccattgtatgaaaagacgtaatcaaagaggtagagtgggagctgtgtctcgtgggtgggggtcttccctggaaacgtcttgagtctgcggtttaatcctttatgtctgagggttgcagaggagccaaagaggggcaaagacagcggggatgagcaagcagcaaaatctgcattcctgacaaagttgcttagactacaaggggaaaagtgtgtatttttagaatgatatgtaagaatacgatagtcttagaaattatgatgagctggagatatggctcagttggtagaaggctcgcctagcatccacacagccctgggttcagaactcaacaccacgtatcctgggtctagtggcacatacgtgtaatcctagcacttgaaaggtagacaggcaggaagatcagaaagttcaaggtcctctcctgctacaaagtgagttcaaggtcagcctgggacatgtgagactgtcacaaacaaacaaacaagacacacatacacaattataaacttctgcaagcaactcagtccattaaggacatggtattctagagagaaggtgcacagaaactaagtactgacaagatatttatatagagaacatgcacacctctagatcctcaatacctgggggctcgcaacttctctcagagttttagcagccagacgcatgtgtgtagctttgaactaaagtgatgctagaatatcctatttttttgtatttgtcccttgcttatgattccagattaatagctttgatggaagctcgcctcctggggagcagagctcttaattctctttgtacacaggacctatccatctcctacagggggtcatgtaacgtcactgagatgttaggtacacgaggacctacaggagaagtagggagctatgggtttgatctcaagaaaatcatttatgaacactaaaacacaaaatgaatgtctctccctggtgtctcttttagtgacaaatcctaggtagagccgatttcaaaactaccaaatgtgaccaggcatggtggcacacacctatggtcctagcaccaggaaggctagaggccgaaggatcaagagctcaaagccagcctcagctatgtaggaagttcaaggccagcctgagctacatgaaatcctgactcaaaaacagaaatgaaaacaccacccctcacaaattaccctcttacctaagtctaagtcatttttttcctcaggttagttaatctgactcagttgggtttcataacattttgagagaaaaaagggggggaaatctggtaaatctgtatcataatttgttgcatttggaattcacagaatcatttctttggattttttagttggacgaaggaatatgacctagaccactggtgcttacaggaactagacaccactgcatagccttctagtcctgtttaattctgcttccttccgagtgcctgccactcctctgcctcaattgtgtggagtgtaaaaacaaaacaacaacaaaaaaacaacctctggaaagaaactatactggactatgaatgtactgggagatgccaaaccagcacctggtcctttctgatacacttgcgtgcttagcaagaggcttgcttccaaatctggggtaccatatcggtacccatcatcggcagtcagggggctggctgatcatgtttcttttgatgacatctttacataaacctcaataggagaatgcttttaagtcatgcctaggatgctgaatgatggctcagtcagtaaaacgtgcttgctttgcaagagtgaggacctgagtttggattcccagaatgcacataagaggagtagctggatggcatggaccccagcactaggaaggcagagacaggagggtcaccagagctcccctgcccagaaagcctagctgaattggcagagcctccggttcgacaaaagaccctgtttcaaataaaaaaggtggaggatgagtgaggaagagacacaaaatgtcagcctttggcctccacatgcacacacacacacacacacacacacaagcacatacacattcacacatgcacacatacaaacacccgccgccccaaaataaatctcacctaaatatttacctgcaaaaagtgaaactgagtcagaaggctcctatgatttataaaaattgaaaatctagctttttttggaagccttccaaggcatgctgaccttggactgttttatcagagtttacatgatttccccccctctctgcctcaccctccctgctctgaggcagttcagggctcttccaggtccactccttacagaactgctatagaaaaaggggctggggattaaacttgagcctgaggagagaggagagccaatcctcactaaaagagtcaaaagccaatgaagggaggcgcccttctgctgcccctcacagcacacagccttcaggctttaagcagtaacctgcattcaggaaagccacacggttcatgtgtgtgtttgaataacacaggcagatgggggctacttcccaagcctgtgaacacagcctgctcctttaaacctgtgacctcatttatttacattagtacagaaagcacagccagaagccacagctgatgacagtcatgtaactttccacaacgacgacaatgaaaacgctccaggcctgctttcacaagcatatgacttttatgtgaaccggattcaaactgtaagatctcggagtccctgtgccaggaaacagcttaggctttgcacaaatcagtgtgatggtagggggtgaaatcccagggcccctcccactcacctgcagctggcctctgccttctgttcccccctttccccatgtctgactccacagtacattgttatatgtgcacacctgccacagacaaacacaccaccaccaccaccaccaccaccaacaacaacaacaacaacaaatagcctgggtaaaggaacagttcgagaaggtaacagaggacagtcaagtagttctggcttccccaaccttgcttgtcttctggcctcttgagctgtgagagaattgattcctgctgcttacattacccagcccatggtgttttgttagaggaagctgctgtggtttgggtgtgctctgagcaagtactcaaaagttcaaatactaggagctttgtctgtagtgtggtgctgtccacaggtgttggaacctttaacaggcagggcacaaagggaaggaataaggtcaacaggccctggggcttggaagggataaatatatttctcatgtgacccaagtaagtaccagtgagagcaggcctgggccgagtgtctctggctttcattcttggcatttagtctcttttgcacatatttccacaatgggaatactatccacagcaaagtcttcattagaggcccaacagagccacctgatcctgaactcccagcttctaaaacctgaaatcaataaaacaaaatgttctttgtaaagtatccagcactgagcactttgttactgcaacagaaaactgactaatacataataagccaagcagactagtattagagggctgcttttcacttcactttctagccgtattgaccagttctgtgtgtcaacttgacacaagctagagtcatcagagcggaagtagcctcagctgaggaaatgcctccatgagatccagctgcaaggcattttctcaattagtgatcaacaggggagggtccagactatggtgggtggtgtcatccctgggctggtggtcctgagttctattagaaagcaggttgagcaagtcatgggtagcaagccagtaagcagcacccaccccaccccaccccccccaccccacccaatggcctccctatcagctcctgcctccaggatcctgccctgtttgagttcccgttctgacttccttcagtgataaagagcaatgctgaagcatgagcgtaacaaaccctttcctccccaaattgctttttggttcatggtatttagtcacagcaactgaaaccctaactgagataccggtataactctatctacatatatgtacgtacatttattataatacctacttttcaagagtcacaccagaacctgtgtgctacctaagagcaaggctcctgggagcccatccagtcaagccagaaatggttcaaggtcaagatggcaggggagggggagtagggagagaggtaggatatgccttaaccacctgcaagccaatgagaagcaagctcatagaaactttagttccacttcgaggcagtcatcacagaagccaatctctctcaaagacattcctcagcttcatagtggacaagccctggctcaagcctgagacagctttctgagccaagaatagtcctggatggagactttctgtgtgtttgaacagtgttctgtactgtgccaaaactctaccttcccaggttaatcaagaggagaaaggggcacactaaaggtgttagtgttcaggcatcagcactggcctgtccttggggttctgacaggattcgccctcagctgcagccactaagagcaccacctgtgcacattcactatgttcccttttaaaggggccctgcccacctcccttcttattctctttctctcgcccactctccctttctcttccaccactcttgcccccagggaccagtctctgcccctttactaccccttctatctcctcttccaataaacctcctatgtgagtcctgttgacatctcttcgtggcgttttttaaacttgagcaaaggggacagtgcaaggctgatggagaacaatgttattaagatggtcctgtaaaacaaagccaccctttccccaagagctgaaccacaaactccgctccacgcagctcctctaattctccaaagagggaacattctctgcttttcagggaagaggaagcttaaagaagaaagccttgctgaacaaacaaacagataaaacgactggttcaaccagccttccgcacaaacggaaaccctgcttttccaccatctacacaacccttctctctcagggctacatttgtctcagaccccaaattaaacacatcacaacttcacatcgaaaatatgctccccaacgggattaaagtgaagcccaatgaaataaatcccagaaatgtcaagagcaagcctcaggggagtaccctcttctaccgtgaaatattcccactggaaattacattcagagaaggccatcaaaaatcatctatgataagaggaagggaagaaaagcaggacacacgacaaggtttgtaaaggagttctgggttaggacccatggctatggcaatgtatggaattggccagtcaaatgcataaaccactcaaacttgttttgaagcacacctcatatgcaaacaacagcttttacaaccatgagttttggaatgctctgaaggtcaaagggctctgggtcacaatttcgagtgctttcttgagccagtgttttcagtccacaaaaagtttagcaacaacttcctcaagtcagggctaaagtctatatttggcaaggctagttaacaaggctaagtattaaccagctgccagaaagagaagggaagagttgtctctgcagccatgtgctacagtcagatcatcccagaatgcttgtgattcacaaggtcaaattgaagccaggtccccaattacaccgagataggagggagggtctggaaacctctgatgatgggcattgtagtgccaggctatagtatcgggtcaaaagctgggtgtcctcatatggtatgccacattatggcccaaccataacagcctgcctgtctctgaggagcagagctgagatcatatattatcaacatgggctcaaggttactggagaaccatacaagtaacagtccttgcagcctgggagacaaagagcagggaactaaccctgtgtgcactccacatcagggtaccataggacatcaccggcacttcctctggaggccatgcccaacacagcatggagtggaagattccctgagggcagagactcacagagcagctcttctttgcacaccaaagggacactggattgtctcttgctgcatgtattgccaacctctatagaatcaagtccacaggtaagccttaagtctctttcccctgagcattccgtaagtgcaacaacacaatccaggaggaggcgagccaccgcaaaaacaggccgttggggaagtgtgaggcctgcatgacaactgttccagggccttctgtgtttgctggtcgctcttccaggatcccctccctgttactctgtgacactaagcagtacatgccccagctctaactcctggtacccagcttctacaaccctgcaatctccagagagataagagtgactgtgtgtatgctaatatggtgactggtggtctgggagccctaaacacctcttatggaactggtatcagaaatcacaaagcggggttagaggccagggaatttcagctccagccctctatcttgatggtaagatgaaaatgaaattgaattgctcacttatggccaaaaatttaatcaatcattcctacttaatgagaactccataaaaacccaaaagaacaagatttggagcgcttccagatggttgagcagcgtgaaagtgatgcctgcacaggacacaagagctgcttgactgccccttccctcgctttgtcttacacatgtctgctgcctgcctgttcatgtacatgctttaggatatcctttataataagcaaggccatataaatattccccctatttctgtgagctgtcatgtcaaattaatcaaatctagagaatgagttgtgagaactttgactttctcctagtcggccataatcgaaagccacatcctgggatttgcaactggtatcaggagtgggagagcccttgtgggtttgggcctgtgagatctgacactacgtccaaggatacggtgttggaattgtgggtaaatgttagggcattgtgcctgctgtcagctgcggaactatctgaagggtagaggaggcctttcaggattcggatggggaggaggcaggagtctgttctctgttcccagaacaaaatcattgaggctgagtataaagaaagtttcccagttttggagactaaacttctaaacagtatggcactacctctggtgaaggtcaccttggctgtgtcacaccgttacaggtggcatcacaggtgggacagtgaataagggggacagaaaaccagggtaacagagaggttgggcttgctacttcctcctcctcctcttcttctgtatttatttatttatttatttttgtaacgactctcttaggagtccataaaaccaatctcatgctctcccaagggcagtgacccaagctgagttccttcctatatgagctgccacaactttgcaacaccactatgttggggaagacatttccaacgctgggactgttgggggccacagtccaccacatcctaaccttagcagagcagacagcacaggacactggtttcctctgagacccatgcaggtgacacagggctcagcaaatgtggtctagaaggttcttccctgccatttgattcacaactactctctcagctcactcttggaccatatggtggcattttattgccttcagaacacctgccactatgggaaattattgatgtcaccctttactttttattattactaagaagtggagctcaggaaagcccaggtgttactagtctcagaggaagcagtgtgctggtggcaggctgccccgtacctctccagtccaggtttgggaaggttgtttggcatcttcatatcctagtttccttctgggtaaagtagagcatcgatgggaaacagagttgatgcaataattaaatgcactactactaaatgagttattcagagaaattgtgagtattcactctgtaccgtctgctctgaatagcaagtgctcattaaacatttttagatgaaatgaacatcggaatgagccagaaagagccattaattatgtgttgttccgcattatgctagggatctgggagattaaaaatagtccccaaagataaatctaactggagagaaaagaggggatgaggatgagggaacattagaagaaactgtagcaaagttgttagtgccaggatgttctgagaacactcgggagagtggcccagatgatgccacgggccatgactcacacaaacagccatgggacaggtgagtcctgctggtcccaggctgaggaagaggcaaagagccagtgtcaggccttacacaaataccccccacccccatgggtttgagatctacaaacatcaaccagacttagtggcctctaacccattccctcctctcctaaccacccatctttggacattcttcatgagcagtgggtgacagagatggatggaagaaactgtgaggaagaaggcttctgagggacacacaggctgagagaagtcaaggaacaggccaggtggccatgggttcagttcagcatacattcatgacatgctcactgtgggcttagggacacagagctccgtcacaggcacatgtctaagtctgctttggccctcagacctggcagctcctccaccttagtagggtcaacagtcacagggtcacagtcttcactgacttggtggctcagattctcctgcttccaactgaagcaccacaataccagatctgccattaggcactttccagggtccctctgatttgccttgttaactctgaacttgtgggctggttatttacatttgaggtcacttaaaatcacattatcaaagatatgaagagacagctcagtgggtaaaatgctcagtgggcaagtataaggatgtgagttcagaccccagcacccacaggaaaatacaagcatcccttgggaggcagagacaggagaatcccagggagctcactggacatacctgggtaggcgtgggctcccatgagcacacacacacacacacacacacacacacacacacacacacacgcacacgcacacgcacacgcacactcacacgcacacgcacacgtgcacgcatatacacacacacacacacacagagagagagagagagagaggagagaaagagagagagagagagagagagagagagagagagagagatgatactaggattgtatcctatgagcttttactccaatgatgagggtttcttctcccctggaaagggttcttaaagccctaattttctcacagggcagtagcatatacttgtgccttgagaggtgcacaggtccacagaaagcaagcatttggaggtgccatggggaagggagcatccaatcctggggcctttagtcagttctgatcatctgttctgtcttttagaaattgggagtgataccctaaccttcatcgagtatgcttgtgtgggggggacagtgctcataccctcacccttcactgagggtgggggcagtgctcacacctcaccttcactgagggtggaggagatgctgacacctcaccttcactgagggtggggcagtgctgtcacctcaccttcactgagggctgctgtcagctatgtggctggactctagccaccattaaatctctaatgagcaaacctgcattggtggcagagcacaaagtgcccagggccagcgcaagttaaatagattctaagtcactgtgcaggtttcaggagaccccacaactccaaggcctgtttgtttcatccctgttacttgcaggaaggaaccctccctccaattaatgatggagtttttcttttcacacgcccatagaggctttgcaggacaagactggtgtgaacacggctgaaaagtaatggctagcaggaccatgaggggagactgtgtctattttaagcagggaaggagaaagcagaacaaaatagacaaaaacaaacatacaggatcatagctaaaatatccaagagtgtccaaagcaaaggcactattggatttgacgctgtgtttatgaaacttagtaagacatatcacctgagtataaatcacaacaatgcaaatgatcaaacaatgaaaaaaccttacttggggtattcccaaacatcagtttccttgaaggaacaaaatgtccacatcaatgttgaagaatttctgctaatgaagagaggccaacatgtactggtcaacacatccatgtggtgatacctgggagttaaaatacaggctcccccaaaggtcacagcctggaaggtcttgggcctggaagtatcatgggcctgcctgctatcatgaaagcctcgtagtctgaagcagttatcccaagactgcatcattttgtaacagtagggtgaagctgtctgttatcactaaagaaacagagttagggagacaagcaagtctagataccttaccaagtgctgtgtgtggtgttctcacaacaccaggaccttcaagcaggcgccaagaggcagtttattctcaaaatactgcaatgcagctctgatacagatctgacaacagactccaaggttgactctcattgaaggccacagtccccaacattattgcccttacttccaaatgctagcagcaagcactgggctttccaggccctgaacacgagttagaaactctctgcttcccttaacaccttgggttcaagaattcactagaatgatccactgaacataggaaagcacttgccctcgtgcttgccgttttattttgaaggatccaaaccaggaccagaaaagtgaagagacagacagtgtaggtctgagaatatcccaagcagggcacctctgtgttcagtgcctatgaaatctagacgccccacccagctggtgtgtccctgtgtgcaaggagggggacacaaccgagcttgagaggccatggtttgtgttcgggtttcattaagtgcttttggaattgattgatcaccagcctgtgactgaaccgaatccccagtccagcttgcctcttctgcagaggctggatacattccaagcctccgtcctccagtcacagggctggcccttctgatagatgaccagttcatcccctgaatcatctcattaatataaactcaggtgtgagccaagggggctctgcaggagattccaaagggtgacaggtcatctcccagaaatcaggggcaaagggcagaaaaataaatttacaattccatagcgataagactgtagacctgagagtcagcctaggcttcatgtgactttcccatgtgacactgagtgactcccttaactgctccagcctctagtttctcatctaaaaagtagtggtaacagttatacaaagatcaccctcactggatagaaaggtaagtgggctactacactgaaaaatgtaaaaagaaacaggccaaaattaacggtaaaaatatattttaccaagctattgtcatttcaacactcaactgagtctctcacattgcaacccacgaaaggttttgaaatccaatacatatgactcagctcagcttagactagctctgttgactagccctgaagactagcccagtctcaacattctgcaaagtcaggtagggcacatccaccaggagaggacagctcaggtagaggcatcatccctattaagtccctcctaagtgccaaagtcattactatctgcccatgttaacagaaagaagcatatgtgtgcgtgtacacggagcacatgtatgtgtgtgcacgtgttcgtatgaattaatgaccaatgacaatactcaatagagttaatgaccaattgcaaaacttcaaagttctataagctacactggaccagaaagtcaactgtctcccccaagatgtgaaatagccactcttttctctggaaactaacaccccaacccatcatctgtggtgtgttctcttcccaggtcctcatgtctcttcagcaaatattttaatccttgcaaaatcaactagctgggaaaaacagcttttgatgggcaaagtctgctggaagacaccatgtagccagatggagaaggctcaagagctctgagtggctgaagagaaggaataaagaaaagatgtaggaagcagctggggcctactgagtcacaaaacgatgcttgtggtcctcttgggctacttttagagccaccagccaatcatatccagccagataccctactccactggttggaaaaagctgtacaatgagaacagggaagaaggttgctcctgggagatagatgccaagatcatttttggacagcattggagcacctgattctctggctcagagtgttttcaaaaatttagctaaagtgtgagctgcatgaggacccgagcttgcagttctcggcaaccatgggaaagccaggcacagtggtgcatatctcaggggttgaggagacaaagatctttgagtggttcactagccaaccaatctaggccaagtgtgagcctcaggttcagtgagaaagcaagtctcaaaaagtaaggaagaaattaggtgacatggtggcacagcagggactgggcatgctgcacacccttgagtgcctgagtttgattcctggaccccacagtgaagggagaggacagaagaacagactctgaaacttattctctaaccttcacgtgtctatttgtggggaggctaataggcaccatcatgcctgcatccatccagttccattgactctcaccacagagggatgggtttctggctacccttcaggcaagaatgaagagatccaccaatgagggcaggtaatggacttttacattacacgaaaaattaattataataagttcaacccagcttgcactttatcttgtgtttctgcatttgcttaaggactttggggactttagtggtataccaaaaatggggcatgggggaaataaaagtatatacttagcatctcacagagtctagctctgtctgttctcactgacattgtaacttttttttttttttattcaaggtcagtgagatatctcagaaggtaaaggtatcaagctgccaagcttgataacctaagatcctgggacccacatggtagaaagtgagaacagacgctcacaggttgtcttcagacctccacagttgtgcacacacacacacacacacacacacacacacacacacacacacacacacacacacacacacacgcaataatttgcttgatcaacagtgtaaaactgtgcgtggttcagatagtggactctttgtggccctggctggttgtttatttccatagaatacctgactgcttcagatgtccaagctgtctcactgtgccctgcccaaaggacatatcaggactacagcccatgtatcagaggatatgtgccatacacacataggactaacccaaagggcagtgggccaaggacagggacttcccttaaaactgaggactttgattggtggctagatcttgtattatgaaggggaaatcaggaacagaaaaggtatctgccactcattcctctaaaaggggctgggataacatggagaagcttctgaagcaggggattccctccagaactttctctaaaaacctggctacaagtgtaatttccatcaagaggcaaattggctgagcagaacatggccactagagagatgacaacactggagaagaaagtctaagagggccatgcaggaagtacaagagcatgcaatatagaatgagaatcaactggagtttctatatgagaatctgcaaaacatgtacatatatgggtaaggaatgaagagaatatgtaaaactgaaaccagggtggtcagggcaggattagtgtatcttttttttttttttattttccattctaaaatgctcttaatgttccaacagtaagtgtgtatagagggcttctattagcaccgaattttctgcagttttcttaaagggaaattgcatgcacttctctagcatagcaccagttcagaaaaacctgggtagttgtctgtccatctcaccaaaatactgactccttcccaaacactgaaacaagatgccgcaggcaacagtctttcctgttgcttcagtagtgatgtcagattgttttatgggacagtttaaaaaaagaaagagtgggtggtttattactatagatattttatactataattatagtgaatttttatcaatatcagctttacaggcagacattatttacagcacttaactatacaactacctaagttatccacccaccccgcttccgtgagacatcacgaccctctccattttcacagacacggtaactgagggataagaaggttcacttgtccaagtgtgaaatgacatgaccttggctcctaactaccaatctctagttcctcagaagaaaataaatatacttacagtagggacgctgaatatgtatgagaggcaggacagaatcatgggttcactcaataacccatcgatgagggtcaggtatggcgatccatgattgcggccttagcagttgcaaggtcaaagcaggaggattagaggaccagggtcatcctcagctacacagtgaattcagggccagcctgggctacttgaaagcttgagagaaagagagagggagagagagggggagagacaagggggagagggagagagagagagaacaagagtggggaagggatgagggaggaggaggggaaggataaaggaaaaggaggaaaggggggaggagagaggggaaagagagctaagaaacagaaaagtgaagaaatcagagtggcctggctaagagggtttgcctagttaacataacttaggaactcacaagaggatgacatgcccacagggggctttaaacaattctcaactataagccacctctatcttcttggggaaatattgtttccagacctacaaagtgacagatacctttgtgtctttttttttttttaagcctagcacacagtgaccaactgcttgatgaggcaggactgtaagtaacacgctccgtaaatacttcacaggctgcactgaggctgcctgaggctgcgtccatccagaaaaccatcatgtagacatgaaaactcaccaaccccaaatctgttggaaactttcttcaaagttgtaatttacatttttccgactaaagatactttatggttttaggttttcttccttgtcccaccatccccatgatgccctgtacccacctccctccacccctacatctgcagggcctgaggtgttttgggtgaagagataacggttacagttggcttctgagtttccatgtttccaagatgtgaagccgcgtgcctgatccagagacaggggcctgcctcagagtacactactctcaactcatttatctacccactccctccaacccctagggtatctctgccttgcactgcagaaggggagaacagaggtgagaaaggacaggaaaggagacgtcaaagcccagcaaccaggcaacagtttgatggtgtctctgggggcttatctcagagaagccacaagcctgatagacatccaggcttcacacacaggatgtaaaacttgtgattaacttcccaatccccattacttgaacagcataagacacaggtctggcacttggggatggacccctcgggaccagcacgcgctctgctgactgactctacctacctttacacctgcctttgttctaccttcatctagtgcccactatggagagggatatgttaatatttaatatccttatatctttattattaagattccggacatttaaaaatacactaattagaagtcctatcgtaaaatgctcaggttccaccaggtaccagatcaagggcctgaacctctgagtcttagccactggtgttttcatgccataggacactggcaatacagaaaggcttcctaaatatgagaaataacattgccattttcaaagtttctctaattgaatcaactactaaaaaccaaaccaaaacaaagaaaaaaaaccaaacgcttctgacacattttaagttaacctgggttacgatgagatcacgtacaaagttaacttaatgacagagtaggccattttcacttgaggacagctacggaaatgggggaagggaatcgggatttaactgaaggcacctctgagataaaacactcattaaaggaacccacagcccacttttaaacagcaatgggataggcccgaaggctactcagatttgagctcaaaagaacagctatgtctttgtccatcttcaagtgacggggacacaccaagatccttggcatgctctaccaccaagtgtgtgtaccaccctgttctttcttaccccctcacccctaccccagggggattgaactcaactcaaaacctggtacaagccagtcaatgactgggatagcacattaaaatatcacatttagagaatcatatgactcattcttttcaaaattttaccatctaaaaaagtgcaacatcgtagtaagaatggaaatacaaaccccaagaaaatggttccgttttcttcagtactggccacccccagttgtttgctctagtcttatcatttcaagaggaaagcagtggcaactcagcctggaaccctggggcccagaactcaagccaggtgggtgaggtctgtggctgtcacctctgatcttcaggttatggctttttcccaccactcctcttaccacgccccctttccaacctatttctttttcttcttctctctttccagtagcaacatctggtagtatttagtgcagcagtagtggacctcagggccatgactcaaagggtgtgagattagtccttccatggaataaatagaaggtatcgaactgggcagcgatgtcctgcttcttatttcagacacaggataaagtcggcaaagtgcccacagcaatatgtgagatgaattaaaggccctcacaagcaaacggggcctgacagcaccccagggccaggcatgcttctttatgcttgatatctgaagtaggcaacatacgtcgaatggggcccttctcaccgtgtaagactagaaggcaaaaccctttctagaaatacaaagaacagttggactttgctttgctttccatgaaattcaagtctggggtggggctgtgaggaagcttttgatgtgaataaaacattaaagaggtcagataatgtgttgaatctacacccattttcttcctgcaaaagcacttctactgtgccagtgatgtgttggatgccaagttgacaagggacagacttgatggctcatctgcgttgtcaacgtgactggattgaggatcacctaggagacacacctgggatgtgtccaaatcacctaggagacacacctctgatatatccctaaggatgttttagaaatatgtaaccatggagagatgatcccatcacataggctggggagcgagaccacatgaaagggggataaagtctacagtccaaacaagagcgagcaacctcatgttcccgccaccaggactccctcaacatggtggccttgacccattcaaaccgtaagccacaatagagccctcctttcattgctttctgtcaggtatttcattacagcagtgagcaggtagttaggttatttcctttatctcctgtaaaatctcccagaggctgcagcttatttcctatgcaatgtaaattcaattttccttttcttcaagccacacagaatatgggccttgctggcaggaggggatacaaatttactaacttttaagtagttatacacatatattctcaaaatgacaatgatgctaatgttttgttcttaggttcaggaggaaaacatgtaaaaggaaagacgtcatgattagaaagtattagcaagctgaatatgaaacatgccttatttgttgtacaataaaagggttttttttgagacaggattccaactgtctacaataaaatttgaaaataaacgcatactaattgtttgttcttccccaccatgaaaaactgttatgtaccttcaaactgtgagtcaataaacctttcctggcttcaggctagaacatcttctcatagcaaccggacaaagaaactaatatagggaccttcatcatttagggtaaacaacgaaggctggtacctcagaagggtacttgaaaacataaaaaaaaaaaaaaaaatgaaaacaggacaaaactctgcctctgaagcattgtttagctgttctgctcaccttgtgtgtcctttttctcaaaaaggacacgtggtggaattaaacacaagtcttggtcctaccagaaacacatccaaagcagtgaggctcaaatgacaaagttccattctgttgttgtacagaggaagaggaaccctgtctaccccgacgatggaggcaggaggagcatgtaatatttccctttatattaaaaaacaacaaattgtttcttttcaggccacagccttggaaagaaattctgtaggcccatagtacttagagaaaggtggggtcatccttgaaaaagaaagctgaggaaacacaaaggcacttagcagaacatttcctgaagacaaactattcctcaaataaactaggtgatgaagaaacacacacacacacacacacacacacattcactcacacacatgcacactcacacactctcacacactcacactcacacacacacacacacacactcacacacacacactcacacacacacacactcacacacacactcacacacacacactcacacacacacacacactcacactcacacactcacacacacacatatactcacacacactcacacacacacacacactcacacacatacacacactcacacacactcacacacacactcacactcacacactcacacacacacacacactcatacacatacacacacacactcacacactcacacactcacaaactcacacacccctaaggctaagggtccaggaagcctggctttgtctggatgttcacttcctagaatttagattgcaagcactgagcggacagatgccccaacttcaccacagcacctcacacaataagggactacttgaagttatgaggcctatggttgaaccttcctccccaccaggatgttcaaccatattgcaccagagctgttagcatctcagatgcttgactgtactggtttgttgctgttttgttttattttgttttttgtttgcagctctggggatcaaacccagggccttgtacctgctgaacaagtactccacacttagatatcccttttctagtcctttacttgatgcatcttcgcattttttttttttagctctttcttaaaacattaagttccttagaaaatgggattgaatgaaggctaatagttggtccatatttccaggacccatgtaaaatctgaatcatgaggtactggtttccaaaatcctttaccttaagtcttttgttgttgttgttgttgttgttgttctgaattcaaacttgaaaacaaaaaaggtagggtgctagtattcaaaatgactaagtaaatcattttatccctatacaatggatgttgctactatgtgatgataatgtacacacaaatacaagacctggcaagacctattttagcagcaaggaccaaggatgtggaattaattgtgcatgtgaccttggattagtcataaatctctccaggcttcatttccataactgcataacgagcttgaactagatcaaccattttccaatttcactgtgcagtagaatcttttggggagcttttcaaaatcttggtgtgtgcgggctgcacccttgaccgactgaatcaaaatctcgggagggtgcacctgatagactgtcatgtgactgcatgagcagccctggggagcactcagactcaaccaccttcccaagctgattagatggccattctgaggatcggaatttctaccctaagctcggtgtggtacacatgtccgtaatctcagcatttgggggaggaggcaagaagatgactgctgcaagttcaagactagcctgagctccactgtgatccggtctcaaaacaaaaacaaacaggatccctttagtgtggagttaggctttggtatcaaaatggatgaagttacctaagcactgccatacgacatactttatgcccagtctgctctccagggatcttggggaaagagatgactgttgatacagcagtggacctaaggaagcatggtgtgctacaaaggcctcaatggcctctgagggtctctgcccagggacctcttctgcccttgtgatcttgctggacctcctgatgggctgtcccagatggactaagcagggaagcacaccttctcacccttctccctgctcgtgcctccttgagaaacatgctttggaactgggtggactgtttttttcctgacaatttcctgcccctgtgctaatgttagtaatcactgagctctacccaccactaccaagattttcctgagtgcatctttgacaacccaggtggctaaacgcagctcagttcacagatctcacctggtaaagagccacagtcctgggttgaaaccaacttgtccttccttctgtttaagttacgagagcatctcaaggcctgacttaggagaactggacggaccactctttatacacctcctctcaattatcccatccatcaggaactaaccaacctcacacaacagagcaaacctaagcctcttagaggtcacccttgaggggtcactcaagctccttaagtatatgccctgtagtctcatgggaaaaacttaactaaggatcagagtgactaagaataggtgtgggagggaggaggctcatgtccatctgtccttcactgcattgcaatgaggcagagggggacagatgagtctgtagtccttcagggaggagcattcaggacccacccagaaaaatagcagcatcaactccccttctcttccctcgcacactcctctgtgccatccagggctgcagcagcccacacccctccccttctatctacccttttatagtcagactacaatccttcttccaaaaataaatcgaggagaggccagagaaaacaaagttgaaaagttttatactttcactattctatccaggacattagctggacagatttatcaccccattttcctaaactcccctacaaataagtaattctagggtatgcccaaattactcagcctcttgacccaacatgtttttgcaattacttggcacaactgtatgctacttaaattaggtaacagtcaccacgttatttttaggccctagcaacacacacacacacacacacacacacacacacacagagagagagagagagagagagagagagagagagagagagagagagagagagagctatatctacgctattatactccctggagagaagaacacaaactatcttttgactgatacctttcaatccacagaaataatgctgagctttgtgtagggacatacactgagctctgctcaacactttgcaagccatcgcttattgaattcctaagtgctgttgtgtcctccttttacaaatgaggaagccagaaagctaaaggcttaagcaactcgcccaaggacactgaatagaggaaccaggagacctcaggcctgctgatgtgctgttctttctacatttctccacattttcctctcttacaatccagtgttctgttcggcatttagccgaacaaaatcgggaattcagaataacaagaataaaataagtttgtgatgtaggtatgtcttaaaagagcatcatcatcacatcccagacaaagaaaggggggatatagtactcccccaaaagaaagcagggtaagaatatttccacaggcgctctaatttctgagcatagtcattcagtgtcacccaactttgcactgctttctaatgcccacttcaggatccgttgtgactaagggaaaaatgttagaccaactttgctctttgttcaggagttaaaaggaaggtttgggagctttgaggtggggtggtacatataacatgaacttacaggtttttataagactagatttttatgtatgtgccatctttacattgaaaactagctcaactatgtgttttaatagaaaatatttctaatatgaaaatgcatagcagagagtagaaattttgcatattgatttgactccctgtgtctctccttctgcaccaatgatgtaagtgacttcttgttcagtcttgttcagtcaccccccacccccacataccctcaaccccttctaaaagcctctggtagagagcagagttttagaaggccacagcagacggtctatcactgctatgtagcaggacagtgtgctcaggccaggcctctgacataccactgcataggcagggacagacaccctgaggagtctcgggtgtggggggggagcttttccttagactctagagtcagtcactaacagtggcattccacatttgaagaatactcatgggcaggtatatgacactaaagtatttagcaggaaaagtgtctaaaatgtctaaaaatgtatatcaccctgtaaaatattcccagcttgattaaacatataatgctaactctaagcattaaactattaaattctaaactactgtgtacgacgtagaatatatcaaaaacaagaaagggaaggggaatagggaaaatacacatttaatctgattggtaggtataaaggtattcattgtacacttttctaagtgtttgaaatttttggatcattaaattttaaaggcctaggctgctctgaggagagtgtggcaggagacttgcccttcctacatacataaagggcaaataattttcatgaacccagcgttgttgaaaaggaaggtagccttacaaacatgatggcaatgacagctgctctcatgttagaaggtcaaggattgtcaagccttctttcttaggccagaaaccaagttgcagttgataaaaaaaacaaccaacattaggtgggaaagggtacaactctttcaaagactaaatccctaaagatttattcatttgaatcacttggatgaagttgacaagaagcaagggtctgatgccatatacccttcagtgggtaagaacgagacacagacttggacctaggtcataccagggcggggactataaattagaacagtaacttaatccaggggcttctgtgcctctgatcagtttcaccccaacctgagattgcctgactaaaatggcaacccagccaccactggactcggcaagcagttccaaaaatggagaacatggcattgaagtgagggacataaaagttggaccgggagggtagcaaccagtgtttacaaacatgaaccagagtctcagatggatcaggcatctctgaaaataaatgaacaaggcctggggacttccgaccatatattctagccatctgctcccaccccaccagccacatgctccctgcaaaattcactcattccaaaatggtagcgttcccgaactagctgaaatacaatctcagatcaccaacaaggggtgtcctaaaataaacccagaagacaagccagcccaggatggtctgcttcatccacttgagaacttaggggaaactgcacaccatgcttgttgagagaagcacacctcacccatcacctccaggacactctgaaatcaacctctggtttgaccagacaagaggataacagggagactcaaccgtccacctccatttccccttccctaacttggtcctgactttaggccattcctcccaaaggtaccaaactaataaagataccagagaagacaacagaccatgaacaacatattttcaaccaaattccaagatatttgaaggaaaatcccccccaaaactacaaataacccaacctctaccaccagagcgtcttccaagctggccgccactgcgttgcaccaatccgaaatgacgagccctcagcgcagctgcccagggcgcctggtggtgaggtcagcagcgtgtccagccccgccccactgaggcagtcttactctgacactgatgagcaagtccaggctcggtgatcctcagatgtgtctacaggagaggatgattctggtccccaagagagacatttctcagcaagtgataggccacccctccgtccaccaagctccatagcaagagagaggatagatccctacacctcccaatcagccccatgttctagttcagagtcatcataaagtgaggtgtttggtacctcttcttagatcacctattaaaaaaggggctatgttttttaaccaaacctatcccaactacaggaggaaaaaaaaaaagccagcaaagttatttgtcttggttaaccaagacaaaatgttacacttggggaatttgtagatggtgttttctcatctgcaaaaaagacaagacaagatcatgctgagagaaagccagccaaacaagaattcagaggtaaagaatagggctacccccacataactctgacatatttgtgactctaagaaaacttactggcaccatcgtaacagtgacttgagctaccagaaccatgaagaactgtgagcccacatgctccaaggaaagctgtgtctttgtgacaggtgtctaccaagacagcaaagggttagggaagcgcatctcacagcaagggtgactagagcatgtttctaagagccttgcagactgcatcacttgggagggacggagaatggatagagctgtcccacaaagacaaatcctagcttgcaaggcctaagcagcctgtgccaacttaaatatgaaaagtgctcagaggagcctggcaacactgataatcaatgatgctttagaactttgctggagatgtgacaggactcactccccaatggctcaaaatgcaaacaaagatagttatcagtcaccaggacgaccaggtagatgctatcagaagagtgatgctcagagcaagtgagccgtgcacaaggtcagggcaaccctgcacggaagaagatcagagaagactgggtcatttgttcctcttgggggttccaatcatcatgttaggagaaagtgaggcatgactccttgggaagaaccagaagccaattgtggttaggtgacactaaaaagaacaaaaggtttgtagggagttcatatctccatcccccgggagctttcctggaggaatggatgtatttggagaaggtaccccttcaatgcagcattaaaataaaaatgtctgcctttgttgaagataactttataaacaacgtgaaagtcaagacaatcagacaggtgagaaacgcaagcgtttcccacacaaaggtggcacctgaagatatatctaatatgtgccatgtatactgcctcctctgggccatcagcattagctagttcttgagaaacaaagactttccaaccactcacagactgaatctatagagctcccagagaagccacgacttgagataacaccttggttgtataaagcaccgtttgaaaaccctatcaggtgaaatgtcttaggcaacacagaagtcagatcaaggctgggaactcagatctggatatcaccgcattgctacttagattttctcattgcatgaaaatagtaagaagagagtagaagaaagacaagaaaggctattttggttcacagtgtctggggagaaacaagaaggctgccacttctaagagactctcaggagggaacctagctgatcaggacagtattgggaaaggagttggggatcattacctttcaacaccacgggttctttgccttctctcttcagggactccaggactatgtgaagtggctgggacggcatcactcggctcggctcattggtattctcatcataaactataatttctttggaaaagatcctcttgaaagagtctttgccttccctacaggaaatcaagtctaagacagtgatcttgccctgctgcagcctccgccggctgatcttatcggcacagttaatgtggacagctccttggatatgactcttattgtactccatgaaaggcctgcagtcaataatgacaggaccctggctggacaggtgactcttgctgcatttggtcatcttcttcgccaggtcattggggtagatgattttgatgctggctagctgcttgggagtccctgacacagggctgcccaccccacccgatggacttaaagagcctgtgttctcattgttgttgaccatctggttagcagggcaggtggtcgaggttcctatggcggtggtggcagtgccagcggcaatggcttgagtctgggcctggtgatccttgtcgtaggttgtcaccgtacagcagctagtactgctgcatccacaattgagggagcgggcagagccgctggatgagggcatatacgtcagattcgcagccttgagggtcacaacagcggtggcaatgacaggagggtggctactgctgcctggggtggcagagccaaggtagctagagtctaaacaaaggttgagatcctgaggtcggacaggcctagacagtgtcactactaccctgtcgtctaaaggagatggaggcatgaggaggctgaaaactggcaattcaagaagaactcaagagtctgtaaagaaggggaagaaggaaagaaagaataaagtcatgtggcacaaaaggcagtctcatccaatccctgggaaagacctctgcatatctcagagcaaagtcagcatcctcccaggtgcccttggtcatgatgccatcaaagcctgaaattcactttgatgtattcagagaggacacatccttgagggaccccatgcattctgatgctaagtcgaaggttaaaattggaagtgaggttagaaatggtaattggcatcctttcagggacccaatcaaagttcagccttcacggacataaaggcaccgagaactgggaacaatgaagacctgacagggaggctcttagatttattctgagcctcctctcctgggcaggagtctatttcacctgtgatggatgcatttgtccaccctggcatgtattctgtttcatttctttgcccactgccaaggcaaagagataagcaagagcattgccagagctcacagagatgcacagaaatgcgtggcagctaaatttacatgggggcagatgtcaactttctgctaatgaggaacgaacgtgtcttcctaagtcagtctcctggactaggagctaatcttgcttgcttccctttctggcggcccctttgaaaacctcaatgcagtcctcttcaaagccctcatgtcttctgtgagcctcttccaaaccaagccgcactaactgtcctaaaaccaagtcccaaaaggagtcaggtctgggaaccccaactcgggctgctgacccatcatgaccccttcttccttggcccagctcacccttgacccctccctgtgctgtgcccctaagcaaagaagggtttggatttcatccgggtggtacagactttgcattgacattggagtagcaactctaaaagattttttcattcctatactgatgtcccctcttggagacagcatggattccatgaaggcaacttcacttgctccttcaccacaggcaggctaattaggaagctgggaagtggtgcccacaggggttacctctgccttcccccaagggtgcctgcaatgggtcacttccctcctcctcctaggcacaaggccactctaaacacagccattctgactcctctactagacatgtacacagcaaagaaatcaaaccccaagcaagagccactcacctaaacgaacttttaagatttgcctggaaaaacattatggatcatgggtctactcaagaccgtcaccgttctctgacaccgagccaaagtgtcaccggcagaatccacacaagcacacacaggagcacgtacccacccgtgtcggcatatccccactgactcaggtttctctcatccacctttggatgggagcaaaggctccaacctcctcctgccttcctccctccctccctcacctccctgcctgcctcccttgcgtagtactttatttatttgcagagcgagtactattccagaagcttaactgtgtccctgctagaccatggatgcagtcaaagtctttgctattgtgttacctggcagaggacgtccgggatcagtagcccattccctaggagcaggacccaagaacgtgttcccagagacaggctggtaccagcacctccacactgagtgcacggctcgcacccaggcacggagtgcaccgaaatctgcatccttgcagcagatagctccaaagccatccagtctggccctgggaaacctccctcaaaaatagcgcttctcccttaccctgtccctcgctagtctcccttctcccactaaacagggactggagcaaaaaacctcaagtggttagggaatgctccttcctcacttctggggcacttagcatcccccttcctcgccaccgctgggcatcagctaagccttgggctttgaaaactgccacaaagcatcttaaccgaaccaaaactcattttcccccttcatcccagggcaaccagacccaaaagcctaaaccttaggaccttccttaactgatgtggatttctctgtctcttacacacacacacacgcgcacacacacacacacacacacacacacacacacgcacacgcacacgcacacgcacgcacacacacaaccccacgggaccctccagcctcgggctctgagtggccgcgatgacttccacttacttcatcaataagcgtagccctccaccatctggcgccggctccagctatgcgctcgcgcactgcgcccccattcactcagcttcattgatccccagcagcaacacagagttactttctcttttgctacagcgtaaatgtaagctccggagggggcggggctaccgccgagcgacgtcgcgctgcaccaatgaggatccagagcccgcggcccgctacctcacagtggcctgtggccaatagacggccgagggggcggagagagaggcgtggcctcgccgcgggaaggaggcccgctcagacgcgaagctgggtttggtgtgttagaacgcgggcggtgatgtcattggcaaccaatcaaaaacttaaaagagccagcccgggcccgcgcggagcagcagctctctatttacatgtaaacctaggcggccgccagacgcggttaacccttcccggggctgaagtgtcaatggctcgcactggccgctctggctgaaactggttctcccggcgtggcggaccccggcctcgcggggtctccattccacttcgtgactcggggtggaggctcaggagtgtccggccaactttcccgaggccggaggcgacccgaagccgggtctctccatggccgtgacagcgcagcgcgggacgtgagcgcgcacagggccggcctccccgcagcccggctctgtccggcccgcagatgtcgctgcctctccggctgccctactgctctcccgcgcggcggctgcgcgccgtgctcctgttcccttacttccgtgccccggtcactcccccgccgtccccggtgtgttcacaggagcccgactcggaactcgaaggtggcagcccggagagctgcgcggaggaggaggtttggctctactccagcggccactgggggcgcgtgctgagcggcggcgtgggcgccatcccgcaaggctgggcgtggccgggctcgcccagcggcccaccagcgccacagccccggcaccggccctcaacccagcccaccccggtcctggccccttccgctgccacctccccgatcgccgtgtcttggcactcgcagtccatccgccccgcggtgctgggccgtcggccctccgtggcgcagagccctcggagagccaaggagcgccagcctggaactgcaagcgcgggcgggaaggagcccgagtttagggtggtgaacatccacaatgagcggcgctggaggagcttggaggagccgaatccagctttctcggttccccgaactttggccatcagaggggtcgctagtcgcagcctgtgtccggggaagagaagtgggaagctgaacaagcctgccagcgcctcgccagaaaaatatcagggaagctgcagaacagtaaccctggaattcaaaggagtggaaaagcctagatgaactatgacgacgatgcatcaaagaatcctaaagcaatagagctttttatacctccctaccccctcctagctcagagaggaagaccaaatgtcaagtaattgaagtggaataaaaacattatctgctctgtgcaaagtccagctgtcactgctaatgggaagtgtttgaaggcgtgctttagaccccagacgctctttcgccattgacgtgtcgatctagaatccgaaggtatccagccatcaccttcggtggtcctctgtcaactgacagtgatctcctttgagttcttgcatgcaggtgcacactggtgttgcaaaaagattgtgtggcccttttctacccaaatacacaacccccgccccccccaacacacacacatccctgaatgtcagtgcatgagtgtccaggacacagcatttggtccttagatctttgagaaccacctagccagttaggctgccagaaaagaagatcccatcaaatgtttcaggcttgtagatgaaatgtcacagaccgtcgatgagcacagtcactggaggtgactggaggtggccggaggagtccccacaattcatggtttgagttctaggtattgagtctcatttttgtcctgcaagattccctgtgtttatctgtgtatctataaaacgtgaccaccaccactccccaccccccacccccacccctccacccccgcccaggaaaacaaaactgaaaaggtagttgggagagtgaaaggcattgctttagaagggaggcacctctgcctagaggtacttacaacctgtaaattgtgattcacaaagccccgaggtgggtaatgtgagagagaaacgtaattcatttaatgagatgattattttattatggtttcaaactagtaagttattgcaaacctgttaagtaaaaatctaagtcatccaggctgggggaactgacaaaactaactcatcatcaatcaaacctgaagcatggaataattaccagattacaaacaaatgcaaagacatggagactttttaaattaggcattacagtttgcatagcttatgctcaaggaagaagtcagacttcagagagagctttgcactctctattttatgatgcttttgtacctcctcgatttcgaagaaagaaagaaagaaagaaagaaagaaagaaagaaagaaagaaagaagaaagaaagaaagaaaaaagaaaggaagttttctgaaatttggcctttaagtttaaatttgtggactccgtcagccaaaggcatgaacacaacctgtttcaaatacacagcaaagcctgacctaagtcccagagaaagcgcaaagcatcttcatcgccccggggatttgtaatatgcttgtgttggtttgtagctttgttcctacaaactctcaggaacaaggttttttgtttgtttgtttttgagacttgtgcagtgtgttagagctgaaggatgcagctaaccatggccaagattggagactgaaaacggatactttagggggacatgttctaaagcttaatccaggtgtctgatggcagatggtgaggtcttcaaattcattctgaaggaaaagctagatggagggggggctcttaccggaaatgtggcaatattaagtcccaagataaagacaatattcaatcagcaagaagcagggaaagtgccgaggaataataggaggaggaggtaggaagcaaagtcctgctagccagcctggggcgaggccaggaggagcccttggaggaagtggcctggaaggtctattcacttgttgagcttcagtccttgatgtgattgtgtcatagaccaccttgctggggtgatgatgcaatgagggtgcagctttgtggatgactgggaagggaattcttccttctgtcctttctgccacaggcatccatggtgcctctttcctcccaagtacatagtagtaactggtgccgtcttggaagctggggggccagaccctcaccagaggctctcttagtcttgttttctcggactgaagaactgtgcaagttgtttttaactgcagagacaggattagtctcgcccctgtgcttagtcactaggagcaagttctggccctggagggccgtgagtagcacatgtctggaactcaggaaaggactctgtttcattttggcggccacttacatgtggattttgcatgcatgaagtgtggttgctgcaactgagacacaccttgggttttgaaaacttgtggaacatataaaggatgttatatgtgaattgtgttatgtgtggattgcttgcctcttagatatgctgggttgtgtgtcattaaaatgaatgtcacccatcttttagttcaaatgtgactagtagatcacttcaaataacatgttcactctacctgtttctgctggatgacaccattctagaaccttccgggactgcttcaatctaagccatgtggatgccaagatcactccaccaggacttcagggcctctccaggccctaagcgtatctagaagacatgggacactgtgagtgggagtggagacctgctgtggatctctgtggccacacctctagtctctgctttcaagacagatcctgatagctctgtattgtttttgaatttttgaaaacagtttccctgtaaggcatttagaggcccagagactagagatgacatagccaaaaccatgtttgatattgggacatggcccaaacatcttttcaaaactcaaacctggcctccactggccacacaaaggtgaatagctggatagggaagtcataggtcccctgtcttcacttaagcagcaagaccccttctctgaagctgcctttgcttctgctccacggactgcccctgccttgtgatgtcacaaatatctgctcttcatcaggagagtattctgactaggcccaagggtcatgattatatacccaatgtactagccatagttcgctagcaacatttaactgatggcttctaattattattgggtattgtcacaccaaagactgttcacatttcccctgtcatcaagctgagcaatcagggttcacccttagaaatccctgccaggactagtctcagaactgagtgtgatcttactgaggaggtaggatactgaaaaggaaatgtatggtgagcattgctaaccaccctgggacttgcttcatgtctgacacaggttgagcattcttaatcctgaaaatccaaaatgctcccacattaaacacgttttgatcataaatatgatgtcacagtagaaatttcaaactgcggtatattaaaatgtttataatatcacctccgggtatgtgtataaggtttatataaagcaaatgagggaactggagtgttgactccatagttaaagaatgcttgctgcttccacagaggacctgagctcagcccccagcacctatgtctggcagctcatgacaaattgagttataactccagttctgaggacaccttcactcatgtgcacatgctccacaaacacagcacacacacacacacacacacacacacacacacacacacacacacacacacaatctttaggaaccataaacaatggctggggaaatggtccagttcatgagtgcaagtaggaggacagaatttagatggccagcacccattcgggatacctaagcctgctctgtttgctcatttaatcttagcaactctttcttgcctgcagatgtagcattttctttagctgtcccagtgtgccctgatgtactttgttgtctttacaagcaagtatcaactgacctgattgtgaagagctaggtttaggagaagagctgtgaaggaaccacatctatggagttgctctgtgctgagcagcgctgggattatttacaaacatggacgcatttaaacctcagcattagcatcggtgctaaagtagctttcgtttgaagatgaggatgtaagaacagcaaaggttaggtgacttatcctaactcatccagctagaaaacagcagaatcagtctttgagatggaaatacagagcagctgtttgcaagcaccctgggctatttagcccatcctcttctcgatcttgtggatacttatccctcctgggtaccttgaatagactctataaaatttgtctatttttctttcgttttctactgatattctgggagtcccaagagctttggctgggtgattggatcatgagagttctggccttttattctcattaactctcttattgctttgtagttcaatgggtaactagaaggtagtagaaagtttagggggtggagcctagttgtagtgtataggttattaggaatgggccatttacgggcatatttggtgcctattccttttgtcttcttttctctgcttcctagtcacgggaggtgagcagtgtcactccccactgtgaagtaatttaccacctgtgtagtcaactcaattgaccatgcactgaaccctctgtaaccacgccccccccaacaaacctttgtccttcaagcttattctctcgggtattttgtcatagcaatggaatgctgactagcaggacttttatttgaggttttaattttttttaacattggtgttagaaagggtaaccctgagaatagagaaggcaaggagtatgcaagtagaagaaagtgtcaaatccagaactgtttggtttcctaagccaacctgactcgactgggggctggtgacaggcctgttgagtccttgtcagttaagctcagtgtgagggttctcagcagacagtgggttgctgctttgggggaggaaggctggttttgagggagatgtccctttacagatgtcagtccccactttattcccagaactgaggacttcttagatgaaagaggccagaaatgggcctccaggaaagttgaaggagttaatgctgagaggacatgttcagagtcactagaagtccaaagatgaagctctgtgccaaatggctgtaaggatgcagacctcttcccttcaggagttcaagccagtgcttcccctggatcggcgtttctcagcctgtgagtcacaactgctttggatcaatttgtcacagtgaagatacaccctgcatatcagatatttgcattaccgctcataacagtagcaaaattgcagttctggggcagcaatgaaaataatgttatcgtggtggtcatcacaagaggaagtgtgctgaagggttgcagcactggggaggaggagaacctcggtgtttaagcttctgagttaacctgacaggcctgcagagcacagatttgagagcagatgtgactcagcttgcttctgtgaggatgtttggggatgagattaacatttgaattgatggactctgagtaaggagatcactctccggaatgtgggtgggctttgtccaatgagcccaatgtctgtctgaatcaaaacactggtctccctcaacaaggaggagttctgccagaaggcatttgagttcaaccccaacactgacttccccaggcctctagcctgtcgcctaactgccctaccccacagattgctttgagtttcaccatctttcatatggcaaaagcctatccatggaattttttctctctctctctgagaggacaggagagaattctatcatctatctacctatatgtctgtccactatctatctatctatctatctatctatctatctatctaaaaacatacctaacagagttcattaaccatgtttaacttccaggagttcacaagtaccctgaaaggatgatgaagatacatgtaccaaatttaggactgatacagaagacaaacacttctctctaccatttattagaggaaagtagaaaatccaggaaagctttctgactgtggtattctgaggcaatgtgaagagcagacagataagtacagatggattttacagcctctggtttgcgcccattctgcctaagggaaggaggatagaaatattttcctttccccaagtgcatatctagtctttacctaagcattctggattttgaacctgtcaagagttcccacggttaagtacagattgctttcccaattttatagcatgcattaaagaaagccactttaagtcccagtattattgttgacatcttactgctgctagttctcattacctctgcttcctcgagttaattggcatgctgtggagtctttgtaaaatcccagcatacaggcccacacactggattactctggcggagaccagggttcacaaaagcaaacagcaaagcagaactccttctattttcaaagcctcttgatgtccctgttttctccagctctctcttggggatgtgcagtgtggctggctatgaatatggtatttgtctgcatcctccctgggttctgctacactggaagctactgggcctgtgtctctctaactctaaagaaccaaggtgactgaaggagggaccctctacaggtcaagagtgacatcagagagtctacattttccatccagtattatcttggtttaaaaacatttttctagtgctgggaatcaaacatagggctttgtacatggtatacaatcacctcacccctgagatacttcccagaccccctgatggtgacctggttcacatactatatgggttttatctaaatctgcactgttgaacaggaaagcagtagccagtttaagtggttaaactataattagtcttaattaggaactaataaactacagaatatgtctgctaggtggctcaataaaaagccccctccatcatatttattttcttaattatatactgccccactctacaaagtgttggcagtagctggttgggatactgtctagttgactcctgatacagttcatatctcttgatggctttcccatgcctgttcttagcatgtacaaagcatgcagtaaaggtttctttgataagactaaaattactcaccgaagaacacacctttaataacagttctagaaaagatcacagtggtcatgccttccaggcacttgtagaaggcgaagaccttaggaagaaatgtatggagacttggaagaagaccttagagaagatgggaagaggattcagtcagtgaagtgtttgtcatgcaagcatgaggacctgggttcaaatccccagaaccagagtagcctgagagtgaactccatccaggttcactgagggaccctccccaccacacacacacacacacacacacacacacacacacacacacacacacacacacacaggaagagggaggcactgatatgcttagttaagggtttctaagaagcataggtgcaaggggagggaatctccaaggaacagctgtagagtgtcagggaagtgaggacatggagagcaacaagtactcttcaaaaaactctagtgacacagagaagatcactaaagagctccacaatggcggaggagtccctgaatttgttctgtcttctttcagaatgcaggaattgagcacactgaaggatgggatgaggagtgtgctgatggagaaggcatggaatagaagtgaggaggaggcagttcttggcatcaactacatggaagcaagagagttggcctctgacagcagcagacatgcatgcgacacacctataaacatgcaggcattcatttgttcacatatgatgaaaataaatcaattgtttttaaaaatagaacaattataaccctaacatcagcacagtgatttgaaagaagcaggcacccataacatgtttgttggatgaataaataatgtcaagacagaaagggtcagtccaatgaccttgtgttgaccagggctgataaaagcagtgccagtaaaatactgcttgactatagtcaagtggtcttgcatcttaaggttgtgctgtgtgtatagatggaggaatgctctagtaaaaagctgggggactgtgcagactgggagacaggcaagccgttattgaaatgaactcaaccattctttaacccagtcctgtatgttctcctcgagcacattaaaaacaatggtgctgccttagttagggtttctactgctaggaagtgacaccatgaccatggaaagtcttacaaaggaaaacacttaaatggggcgtattgcttacaattcagaggtttagtccattattgtcatggtgggaagtaaggcagcgtgcaggcagacatgatgctggagctgagagtccttacatcttgattcaaaggcaacaggaagtgaactgagacactgggcatggctggagcatatgagacctcaaatcctgcctccacagtaacatacttcctccaacaagaccacacctactccaacaaggccacacctcctaatagtgccactcccttttctttcaaaccaccacaggtggtttctttcaaaacatctttcaaaataagagtcctacccaccatctctgcactatgtcagctattctttgtaaagtttccttggtttctctctgtttcaacttcacttttgccttcctcatggggcccctgccaaaaccctgccattttcacttctgccctcgatttagccctgatctatttaccatctctttgtcgtctgagttcacctaagatacaatttgcagagtcttccctccacagatgagaagatggacccacctgctactccactagctgtagggcagagagaggggagcaggtggagaaagtggcacagccttttggagccaaaaaatagattatggctggaaactcccatcttgatttggcccaggggccacaggtatatttggctggcccctgattgacataattattattgccagaaattaattttagaaagaacttgaaaggaggacatgggtgattaaagttctaataataacattttgagaaagtctgggttaatgaatctgcaactcaggtaaaagaaaagaggctgcgagtgttcggggactagcacctggaactgagcttggaaaaataaaagatatttggctgggaagtcaagtagggcatggctagaattgcctctgaaaatgtttatgaagcaaagcttcacaatgcagattgtgtgtgtgtgtgtatgtgtgtgtgtgtgtgtgtgtgtgtgtgtgtgtgtgtgtgtgtgtgtgtgcaaccagagaaagaactcaagcctcagtccttgccttccatcttgacacagtgtctctttgttgtttgtcactgagaagcacatgccaggctaactagcctggcaactgccagggattattctgcctctaccttccatttctttatgggagagttcgggttatagaatcccaacctaatgtgagttcttaggattcaaactcaggccctcacatatgtgcttttcccagttagttatctccccggttcactgaacagtgctgtacattcactctgagtatctgaacatgacagacagtccactagtcccttcggaagggtgctgtgggcctgaaccgagcagctgggagcatttggctcctcatatcattcactttgattgggtcaaggtgcagtctgattggtggatgccttgacagttgttaaacaggagttcttgatttctaagccctggttttcatatctgaaaactccatgaagctccttgtacagaactaccactgcaataagaaagttccaaaagcttcaccctgagaaatgaacacccccaaagcttaggtaatatacatccatgtcatggaggtgtcttccagccttattctcaggagcgatgtgtcagattacacaggggggaaaaaaaggcatgggcaatgagaaagcaagtcacagagggatgagcacactggtgagcaagcaaacgacaaatggaagcatccgtctctctggggtcacctctgcatttccaaagaagacacagtaagtctgtgtggttcaacacagaggaatgggaagagatgttgactccagtgaaaaacaggctagaatcagaaagcactgacatttgcagatataaacttgagttttcggaaaaccacatcatgaagagcactatgatttcaagaggcctttcgtgcatgtggcaccccgtgcaaaacatgccgggagaggccaccacatcactacatcacaggaactggacagatgagctcttaagtgaatgaccaaagattccaagtacctgggctccacagagagacaggcacctggatgatgtaatggctttgcctctttatgtggcatacactgagccaccttccaatctctattctaacctctccaaataatgtcttcgtgggaccaacagaatgactgtctcaagaggaagagagcttggacgttgcctactgaagcctgctttttccaaggaaggtgaaggaaacataaggaagtgagaccctttgctcaagaggaaaacagaggctggttacacatcagtaccagagatggccatttctggctattttgtgtgatttctgtgttggaaataaacttgctatcagaatgcccgtggaagcagtcaccccactattgtattgtagtgtcagtcacagaatgagggcactttgctagcactgctcacccgaacatccaactctctacgagacacttttgattcctgagagatcccaggctgcatgagttcgagaatcccaggcctgtatttgaaaggactctggagcaaatacttcatactgtgaggcaaagaggcatattccagtttggcttcctgagtaattcttaaggaaactctatgcttaccctcacagtggcaccatctggcttgttttgcttgctcagtgatgctctttgcagattaaacttccacaagggcagagcaaggttatttgtccattgtgttcaaccctgaatgcctgatacaacacttacaaaagagtctagaaccaagagggtatacaataagtatttgatgattacaaaaattgatttttgccaggcataatggtcaatgcctttactcctagcattcaggaagcagaggcaggcagatctctgtgactttgagaccagcctgatccacatggcaagttccaagctagccagggcgacatagtgaaaccctgggtcaaaaacctttttccagctgttgttttaggaagggaattcctggccctgcctcctctctgccggtgtccaactacggatgtttctgttacctgtggctgttctctcatggagcatagctacatagccgcaaaatatcccttcttgacttgactggcaaaggcagccactgccacctgaggcagctggggtttgcccatctccttctggtgaactcaaagcacccaacccacaatgggggaagtttcttcctacagcaactctgtgtgttttatgtaccacataagaacagttggtctccaaagctacatagagaaaccttgtcaaaaaaaaaaaaaaaaaaaaaaaaaaaaaagacatttggtcaatgatggtcccaaagatttacattcgttatttttctcgtggctatgacaaaatacctgacaaaagcaacttagtgaaagaaggcattgtcttgtatagtttgagggtacagtgcgtcatggtggggaggtcatcacattaagtctgcaggcaagaggcagagagagaggatgctggtgctggctcactgtcctttttgttcacccaggactccagaaaatgataagatgctgctcacatttaaggaggggtaaaatagtctggaaacttcctcacagacatgcccagaggtttgtccccaaggtgaccttagaccctgtcaagttgacattgttaacaatcgtgactatatcacctaatgtcctaagtaccgtaacataagtccatgccttgatgttcacatgacgacaaaatggcctaacaaggcgcatgtctctgaacctgtccccacaactaagcctctgagaactgtagtcatctcccctcctgactgttaaaagccaacagcaaaaaataaactaatgattcaactgggggcattggtgcacacctttaatcctagtactcacaaggcagaggcaggcatatctctgtgagttcaaggcctgcctggtctacagagtgagttccaggacagccggagttatgtagtgggactccatcttgaaaaacaaataaacaaataacaacaacaaatataaatgaaagacaaattactatcataacttcatttaaaatctagacatttatttgtccactctgtggctgctgcctcagtgatgcccgggagcccctgacctgcttaacaagttttggtcactcttttgtactctaagatggttcagatctcatgaggatcccatggagcagaacagcaagcagagtaggctcttgcccactccaactcagctccttgatcattggccgctggctctgtcctgacatcacagtgtaatgccatcctgattgcgcaaggggagcaatggcatgcttatatcccttccccaggcttctgcgctgttcacagtgtggagctggggctcactgccacccttttgtcctctgatttcttacaattgcccatcagctttggccccctacctctgagtgactagtgctctgggaacaaagaatagcaaccgtaataagaacccacaatttcctgtcatcgttagtggccaggcatggtgctaaacacgttatttgaatgacctcactcggttttcattaaaatcatgtacagtattgtagaattgtgagttgacaagccagagacagcagcacacacttgtgcctcagcacctgggagactgaggaagagggatcattcgagctccagaccaggctgagctatagagtgagaccctgtctcagacaagacaaaaaaaaaaaaaaaaaaaaaaaagcaaataagaataagaaagtattgcatgtggattaaatccagggcaggggcttcagggctgggagtggggagatgctacaagagatcaagtaattgacccgaggacacagagcccagctcttgatcttcttgcttcctttcttatttctttgcaatccaaaattgcacccaatctttaaaaagagtaattggttactccctggcttaaggttcatgactgctgttcctctgctaccacacagtctttactaggagccccatagggtcagcctcctgtcctcatgcctagtcacctcttcaggtctttttccctccctcactaagtttcaacacacatgcttctggaggaaaactgacctctttctggcactacctcatttgagctgccttgtgccctcagagaacggagctctgctagctcactgcccagctggctccctttcccccttcaactctgagccttaatgccaccttcctaaacatctttttaagtaggggacttctcatatttattttatttgtttcataacaaacaaacattttgaaaccacttgtttgtagaaaatctgcatttttctctacctgttggaaaagatagcatgtgtctccggttctcatttaacatctgttttcgcataaaatgaacagtttctgaatgaaccaaggtagaatctgactgattcatggacagatgcccacaaagccaatgaattaaactttggcttcagtatttgcaagagtcctagcaatgtgtccacattgtcacggagtttcaaaaaaaaaaaaaaaaatccccaaatgtgagatatttaaactatggttagaactagtgagatatttgatgtggttcttatagataggttgagagcagacgggttcaagagcactgcccctctctgttgtgtggactctcttgcagttgtgacacaaaggtatgaggccacagcatcagagatgtatggactctggaaaagggacaatgtttgaaatatgtggcaccagagtctatggtttcacattctctggatcctacagttcatttacaaaatctcagcagaatttgcccaactttgataacagtctttaaaaaagtatttggctttgttaaatgaggaaaaatatgaaagacacttctttcaattgtcatttatttaaaaaatttataattgtataattcatggtattataactatgcaataaggtttaatatatgcacattagaaaccaaagtatttagaaagtcgagagaagttggatggactgtgagatgtgacgagacaatctgactgtatgagaaaggtgtgaaatggggctggagagataggtaagaagttaagagcacttgtttcttttatagaggacccggattcagttcccaacacccacatgatggctcacaacctgctataactccagttccagtagatccaatgccctcttctggcccccaacagcatcaagtaggaaagtggtacagacactcatgcaggcaagacacacgcacgcacgcacgcacatgcgtgagcatagacacacaagttaaaaactcacaaaaaccaaaaaggagatgtgtgagaggagctcattgagaagaatgggactggggtgtgatggcatctctttaaagccagcagtggatctcagtgagtctgaagcttgatcttcatagagagttcccagccagccaggaatacagagtgacaccttgtctcagataggaagagagtaaaaagctggagagggggggagctagctcaactaacgataggcataagaggaaattgaatctctatgactcaaggtaaaagacgacttggaagttcacaccttggctgcctctagagcactaggctcccgtaggtttcttcggtccctgaggtcaccactacagagggcttggccacactgtacatcttatctataccttctccaagccccaagataaagtgggacaatagaaccagtgtcctaaaaccttaaatcccatctagactcaaagattcctctaaaggaagggacccatgccctgtaaagtctacagatgtacgatttcccttttactgagtggccttaaccactgagccatctctccagtcccctatttcctctcctagttctcacctcacctgtggcatttacacttagattgctccatcttgactatcttctcttactccctttgttgctaattatcactttctgtccctgttactttattttataaagattaattctggatgcaatgaagaatttaatattctccatcattttctatggtgtattaaatatagttctcagctctgtttgcgaaggcaggtatttattttaccttcactgtggaaagatgtttctccttggcctatggagaggtggttagctgactctatcctgttacaacttggaaggcattgttctaatcttctaaaataagtcatcagaatttcttaccattctcctagtatatagtatccttttaactgatagatttatttttagaagacttttaggatgatagaacatacaggagcaaagaagagtcttaggggattgtcaaagcccatggcaagaaggaggacagcccttgcaaccatacagttggaactccatgctattctgaactccccatggacatatggccctgtctgtcctttctcacaggacagacatgtgtggccctattcatcctcttccacagatacacatggctctacccctttcccatgagtgtttgactcaacataccaatggcatgaatggcttgacacagtgacctgttttagcagagagaagagctgggttctcccagagcagaaaacatgagatggctgtctgagcttcatttctgttattgtgagaaatatcctgaccaaaagtaactttgtggagggaaggttttatcttacccttcaggttatagtccgttattgagcaagtcaggacaggaactcaagcatgaacctggagagccatttctgctttgctgttctgtacagcatcacctctgagccagggacttcctgttaaagaagaaagcagaaatcacagagaaacactacttgctggctcacacaggctcatactcagctagtttccttatacgctccaggattacctgcccagggaatggtgttatccacagtgggctggtccctcctacaccaattaacaatcaagacaatcccccatagataagtccacaggccagtctgatccaggcagttctcatccttagttgaggatctcctgccaggagactctaggctgtaacaagttaacagtcaaagccgaccaggatgatgacagagacctcctaaagcttcttcatggccatttcttccttgcttgatctcctttattgcagggaactgatgttcagtgtagaatcgtgacccagtaaataagtgcaagtcactttgcaaatatcaaacaccacagaagtaatttttaatatcccatcagccccagtggtggatttatagcctatatccattaaatgagccttggaaataatctacctagtacttatgtatgcatgcatattgtataaggctacacttgtctcaccttctggaaggaaaaaatatttatgtagcaggcttaggatggaattaattctgttcttttttcagcccattcatagatatgatcactaactggcctttatcagtgaaggttctgctgcctcagatgttattttatcaataacattttaatatttttcctaccaaggccccatttgccttattgtttagatgtggagcaagaggggtcagggagcaggtagctgattgatttgaaaagctgggcctgagtagttgctgggaaggatgggaagtcaggcccagggttcagatttctctggtgagaagggatggggttagctaatccagttcatttagccccctgtttcaattcattcagttcaattcaattgccagagagagggacataagggctgagattcaaacactcagagaggaaaatgaaccccaaacttcagacttcctatccatagatagggcactctgatggggttgaatgtgcagtgtagctcacccacaggctgctgtttgaacacttggttcccctctgatggtgccctttgggaagactgaggaacacttaggaggtggggccttatggaggaggagggtcactagggaccagggccttgcagtttaatggctctaaatcacttcctgtatgctctctgcttcctggctgctgatccaatgtggcaagctggcctccagcttccctgccatgatggactcctgggatggtaaactcaaataattccttactctcttaaactggtttgcattagggttttggtgacagcaacaagaaaggtaactgataaagagcagagctataaaccctgattgtatgggtaggaatttctaactgtgtttagtggctttattctggaaccaaagacagagtcctaaagaatccagaagacttagacatgcacttcctcttggtcaccatcaggaggcattgtctttagggggcgccggacattccactaaggtgtggtgcaggcctctgagacagcattaaggcagtgaccaggttggtgatgggcaaggtttgctgctaccagtccaggcctgcagtgttcagaacgacagcagcaccttctccttatgtctggggcctgcccagcagttcatggagtccttctctgtattttctaatcatctcatctcattgatggagttaccatagtcatttgtgttatgggtaaagaaaacatgacccagaagccattgatggagttacagtaatcatttgtgttatgggtaaagaaaacatgacccagaaggtcttgaaatcagtgagcaccgcatatctagaccaagggaagaagaggaatttgaaccccggtgttttgtacagcttagtgctttcctgggattcagagctcagtcaccttctcaccaaagtgttaccacctaacagcagtggactgaagtacaatgaaaggtgctttggaagctgctgcatgggtttactgttatctctaccatgctccttgtgttccttcaacaagtcggtacaaatagctttttcttgtgtttagaaccgtgtccaggaggtttgcagttcatcagcaaaatctatggagaggggtttggggagatgtctcagaggccaaagagtttgttgaacaagcactagaaactgagtttggtctccagcatccctgtaaaagctatgcatctctaactctagtgacggggaggtagagacaggcgatccctgggacttgctggctagtagtgtagccagctcatgggcacaagatttagtggaaaaccatgtcttaaaaaaaaaaaacaattaagaaagatgtttgacattgacctctggcctctagactggtacacacatctgcacatgtaacccacacacatacacaagtatgcatacatacaagcatgcacatacacaccagcacagagaagacagaatttaggcctatccaatagagcctccccagagtctctaattgccttgtttatctttcccttttatttcttgattttctcacagggacatggtttgggggcttcagtcattttgaggtctctttctgaggtataggcacagcacctagcacgctgcagacattctccacaagctaattagaaaacaaacaaacccaaaaaccaaccccccctcaaaacaaaaacaaagcaaaaaacaaaacaacaacaacaacaaaaacccccaaaccaaaaagagtcctgcatactgctttgccacagctcattgataaagacacagtctgttggctttttctgtccttctgaagaggcagagcttctaaaatgttgccacgtgtctcgaaacaacaaggcatataaagctcgggacagaaatgaatctcttccttttgaacacacagccatgaccaaggaagcataaattcagctatactcagggtttcccctgtggtgctgaggcaaatggctggctcagtgaaagagaagataccaagctcttaggtgctttccacacaaggtattggacatcaaaacacttcaccaagttgggcagcaacactagttaaaaatcttctaccactagcatctacaattgaaggtgacctgcatgcctttcagagctctaactggggcacctggctaaggtcatatggcctgtgtgactcaggaactagagctggaaaggacttcggataacagactgaggatcccattgatcctccatcttgcatgtgtaccccctgggtaagtgaggtgcagaagctaagccacttgagggtctagttgcgtgagtagcccaagttgggtctcagtcctgtccattacctgcttcaacatcacagcctggtattgagccatccatggcctttttgcctcaatgtgcctgtcccagctccctgtggagaaacaatgaaatggagctgtgtgatgtcacctggccactgcccagcggcagactgccctgtctacaacagttgcacagtttcagagtgctgcccctagggataggaggaggagcaggggacaaaggtgagcaagacagaggcatccacagtgagtagtgtcaacacaagctccaccatcagctgccaaaatggagaaaatcaacacattaatcacccccacagccatctggcgaaaggacttcagaaatgccgtgtcatcatcaagtccctgaccagccatctcacagattcactggaaaatgtcaacctgaaaggcatgctccattcaaagccaaagcattgcagagaagtggatttcatactaagatattctctcttccaggctccttctttccctgttcccaaaacatttgcttgagttggctgtacaactaagtagtagctaagcgagagcaattggttgcagtgaccatccccgggaaagaggcagaaacagtagagaccacagtcagggctcacctgcccctctctcttcttccacttagcccgctgtgtctcttgtgagtttaaaaaagaaaccccagctgtcaagtacgcccggggaacctcaaagactgtctgtgaagcccaattcctccaacttttacatctctccatgcacatagggtaggaaatgttgagagtaaacaccaagcatgcttgtaatggcccacatcctgcttctccatagtggggtttcttcattttctgcagatatggacagtctaaagtgttttgaattaataagcaatgaagaaaggaacgaatgaccaaacctggggtgaaaaatagattcataatagataattcctaggtctttctaagttctacctggctttgttggtggcatggtccctggatggatcagagccaccatctgagtccaccaagctgattctgcaaagggctagtctaaaggcagcagcagaccaaaggctggatctggggagttagttttcctggatatctgtaggagctgggacaaaccgagaaaaaggaaaccactttaaataccttaagcagaggcaacatcattaaaaaataattggccacccaggttttttgaagaataaaagaaaaaggaatattctgaaagaaaaaacagttttaacatgaaaactcagaattccctgggaattcatagtcaggaggccacagacttgactttccctcagatgtagggtaacctaagtcaacagaaacctccttgttgatgggacagggttatgtttatctccatcatagtggcttcttctaccagacaggaacttggattcgatacagagccacaatgtcctatcaagtccccatgtctgctagcaggcagtaatggatactggacagcttggagacacagatcactcaaatcaaccctcttgtaggctctgccaacacttgatcgtggcaaaagggcttagcttgaaaactgaatccaaaccctacagttggcaacctacaagccaaatcattaagcagaaatgagtggagctgtttggattaaattggccagaaaaagtggaagccaaacgctcatttgtaagggagctttggcaatccatgagtttagcattcagaagttcagaatgcctaatcctattcacagtattagcttgaaatttcccagttcagctaggttggctggccacccacggagccccagggattttcctgtcttcaccttcctggggcatataagtgcatatcaccacactcaacatatttttaaaacatgtgttctggacatgaaactcaggctctcatgctcacaatgtaatcactttacagacagagccatcgatccagccctcatcaccattatcatcaccatcctcctcctcctcctcctcctcatcatctctctctcgataatttccattcatcctccatgctcttgcccagaatattgcttgagatgcaagcttgcctcagagaaaactcttgagaagatgagcgcctggacagagccatctgtctctcctttcaccttcacttccactaggtaacttttcttgagccagagtaagcctgtggcaatacccatgaagctcaagggaaaaacatttaaaggcaaacacacctttgtatatcacggagtagaggatatggatatgacagaaagaaaacatatttacagtcatgagcgtacacaattccagaagccaagctatgactcaagaaattcattaatgctgcccccacctccatgaacctctgatcgtccatcaaccaacacaacttagcagaagtcaccaaatttatcttaaaagctctatgaaataggccaaatagcacttggtcatgtgtcccaagggtttttttttaattaataaattatttttatgtgtatgagtgttttgcctgaatgtatgcctgtgcactgtatgcaagcctggtacctgagaagaccaaaagagggaactggatctccaggtactggaggtgcagatggtggtgaactactacacaggtgcagggaatcaaacccgggtcctctgcaagagcccggtccgtcccagattaacagatggattctctctcttcccagtgtctcttcaataaccagggtccactttttgcgctgtagtacaaaggacagcagaatggagtcttaatttctgaatatttagctatgtgtctgacttcatgagccagctgattgttagctattgatttacagaaggaatggacgctgtgctgacattggaacatatgcttttactccgattgtcactttccaattttcaatgctctgggaacagaatctgagctggtaagggaacagcatgtgtggcagttttaatgagaacagctctcaaggatcatacggttggatgcttggtccccagttgctggaactgtttaagaaggacgctgggtgagagggagtgggtcttgcaggtttcgaagactcttaggattcccagtgttctcataacctcctgcttacacaattgagagtgagctctctgccgctcctgttgccgtgcctttgctctgacgtcaccgactctaccccttgtaattgtgagcccacccaactgctttctgttggaagtctcttgttgtttgtcacagcaacagaaaagtaactaaggcagcatgcttaaacactcttcatctcctaaagttagttattttagtttttgaaattataattatatcacctttcctttccctttcctctttccagaccatccccagataccttgtgttgctctctttctatacatataacacccaatacagaactgcagcctgctcagtcagtttcatgttgcctgtatatatgtttttagaactgatggtttggtattgactaccaactggtgtgctgtatggaagactctcccactcgcaccaatccttagttgactatagttctttgtaaggctgagggctcttgggctgtccactttactatgtcttttattgtcttcattcagttctcggttgggcagtcatgttggtgacactttctgggtgtagcttctgacattcctaggaggcacaatctcatagccaactctctggtcatctggctcttgccatctttgcccaatcttcctcaatgacccctgagacttcagtgtagaaggtgttttgtagctgtatctgttgggactgggttccataaccctacattttgattgttgtggtttttttgtagtgcccccttacctcccccatgccatcaggtctagaaagtaagtcaccattcactttagatgcaaggtgcataggcccctgagctggatggccctgaaccaaacgcctcatccctgacgacagctttcatagtaccaggaggtgccgtgccagcctccaaaggaggaaagcaaccacagtcctgcagagtgatgatggatatgaaacacagcaacaagcagcattgggtgataaccctaagataacccatgcactggcggtaaccaacagctctctgatcggcatccagacccatcaataagaaggaggaagtcatgcctggtactggaaacctggccaaccgcccatgctggtaaagttatggatcttagaggagaacccacaaccaccattttattaacccaacataattcctaactactttctaagtatttggccttattcccaaggataagtatagtcctaagaccttataaacgtctccttacaataccattaacttttactctactcagagtgcaagaaatacttaagagcacccttagcatgtctacaagagtcaaactcagttgggggttagaattcacttgctccaaatacctggggcatgtttgaggaatgctgtcaaatagcaatatgatattgagtatcactccccgtgctcctttctctgttgtcaggacaaagctttgggatgtaatcctattgaattaccctaaataacagggagctgacttctcaatctgtaagacaatagaaataagtcaatgtgatgactcagtggtaaatgtactgggtgtgcaagcctgatggcccaagtttcattcttggagcctacaatgaaggagagaaattagttctcttctgacctttgtgtatgcatgtgaccctgtacacacacacacacacacacacacacacacacacacacagctcatttgaagatactcataggccaggactctcaaataggaggtacattgtatgtctaacctctgaagtctttattatagatttttcaaggttggagatgtgggtagatgcgaaccatttctgcactagtctctggcttggtcaggaatccaagacagtagagcagggagcagactctaaaagtgtgcattgcatctcctctttggccatgatgtcctctctatttctgctccctttgagtctgggctgacctttcaactttcttgatgaacaaaatgtgataaaagttaaaatttagatttttttggggggggaatctgttcttcctgttcttggaaacttcatctagctgggtatggtggtgcatgcctttaatctcatcactcaggaggcagatgcaagggtcctctgtaaattcaaggccagtagccctgtctacaaattaggtttcaggacagccaggaaacacaaagagacccacccatcttccaaataaaaggaaaagaaagaaacttactctagacaactggaagaagagaggtcatctgaggaggacttgaagttatctcagttagtggctagaatcactgactccattgttcccttggcatatccctgtcactgtgacaataaaaatatcttcaagatactccaggctcatttcatatttcctcagtgttagcatcagttttatccaagaagttcttgttctatttattggcttttctgtgtttgcttgttcttattgagttacacactaaaggcaatgcctcacattttcaaggcacacattctaccattgagctatatccctagcccccctcccctgtgatttttatgttttgaaatatgacatgatagtgctgtgttaccaaagctggcttttcgttcactttgtagtctgggctggccttgaattaattataattataatataatatataattaattataaagacatatatgtatagtatatatgcacatacaaaatctcagctgaaaaaaacggagaattatgggtgtgtatactaacctgtatgtatatgttttaacatgtaaatataaatatatatgcctaatataagtataatatttctcttttattctggccatccgtttccatttaagctaaaggtaactcatactgatgtctacaagtataatccattatcccatggaccattctcttctttttccttgcttatccataaccttatctgaagtgcagaacctggcttcttctatttactcaaatatgctgtaccattatatatagatgatggtttcagaatggttaacccttactcttgtggaatggaacacaacttgaccaacgggggtgcagtgctgacagacaaactcggacacagtacatacagaccagggaggatgccgggatgctgggatgccaagatgccttttgtatgctgggcaaatgctctgtcactgagctaaccttttggccctgtggttctcttctcaccatgtggagttttggcagcaagcacctttgtctgctgaaccatccatcttactggctcactgctaggcaagtgtgtgtgtgtgtggagagagagagagagagagagagagagagagagagagagagagagagagagacttcatttctcaaagtgcactccttaggacaccaatcctgtaagtgttctgtcttcaggcaggcctgtggtcaggcgggtttgatacaacagcatccctacaagccatgccttagcagtattcagagctatgccatattccagcacaccagagtctctgagctggtttagaacaagcaccccttctcagcttcactccgcccaggctccctcagacctgtttatcgttaggttactcctccattactacccactaccgtctctcaagcaaaaagtgccttctattttcagtgaaatgccacattaacagttttggtcatataaaggatgtatcttgagtgaccgaccctctggtggcgtctctttctgtctgatgtccagtgtcagccatcctcatctacccacctacacaggctgttgcggcaagaacagaagattaataaaaagccctgtaaactcaacatcccggtctgtgtggacagccccctccccccccccaattgcctctgttaaggaactacacatctagataaataacaggccacactgggattatttcctctgttctgccgagcactcctaaagataaggaagcattcttccagacataactagccatcaaaatccatttataacaattcccaggtagagtggttatctgggttgctgacaatgggcctccttcccacctgtctctttcattgtgttccaatggagaggttcagccattactcttggcctgacaagagatagtgttttggcccttggagctctgacaattgcattcagcccagttaattacttccagcacaagcgagggctttattaacagaactcagctcagccaggccttccttcaggtcacagggagacatggctaattgagactcacctacaggaagctatgcagacaccatgggggcagcagcaatggacccttctttattgtcattaatgaatgaggtctaaatatcagaacctcctgtatgcaagaggctccagaaaaccgagaagtcaaaaaaccaaccaggcatggcaaaaaaaggctttaagctttatttccatgctgagaaaatgaaaaatctccccgggccccaaagtgcccttgaacttccacacccactggtcaccctttgcagcccagttcacagcccagttcacagcggcattctccgccttctcccctgagaacccaaccagccaaacctcctggcttcctttgtgccatccctgctatggagtttttagggttagagcccagacaagtaaggttttgccgcctatcctcaatagaacaattaaataatagtgaaaatcaatagtgaaaagcagaaaaaatttattcattgtgtcacattgggaaggacaatggtcctgtgacaccctcgaaagtctatctgcaaagtcctgacattcggtatatgtttaaacagaggacaggaagtatgcatggctaagcagcccctgtcacctgcccctcatcattgtctctcctgacagggtctaataggttgtcagaactgtgtgaaatcccttgccaggagacaaactccctctgactggcattaggaactttttaaccttttccttcttccagcacagactcctgggaaaattctaatttcctgaggtccattgtttcaatagtctgatagcctaaaggtggggtgctagtgtctctttaaaacatcacaattctccccagaaagtttgtatccctacttatttgtgcacaagagtatctctgggctccagaggtgatccttgaagaccctctaggaattcagatattcacatgcctgggggggggagtagtttagtgttgttctgtgtctgccccacccccacagacacacctgcacatagggaaatgccagaataccttagactgctgcggctgcagaagccctggctgtaaacttgggatttaggcattcattgcctccaacgtttctgagtgtgtgttgtcaccagacatttagatccgtaaagctaccaccacctgagagtctctgtgctttaaatgaagttagggagcagaaaatggtaaaggacaaaggacttatttacaatttggccaaatcaaggagagacaggctctgaggtcactcccctctccctgtggcagtgttacgatcccaaagaaaagatcaaacaaatgccaggaaaagccgggtgttggtggcgcacgcctttaatcccagcacttgggaggcagaggcagacagatctctgtgagttcgaggccagcctggtctccagagcctgtgccaggataggctccaaagctacacagagaaaccctgtctcgaaaaaccaaaaaaaccaaaaacaaaaacaaaaaaacaaatgccaggaaatatggatatgccaatttagctatatgacaggctgtcctagacttgtgacatctcttcctgccagacaagtcctcttctggtgactccagggctgtagtctttctcctcacaagagtgagattcctggggaaatgttgatctttagaatccattgttttagggaccccatttttctccatccatctcttctctttgcctgtgaggggaggcatctttagtgcccccagccatctttaggtgtctgagcactgtctaggttttcgactaaaaactaaacaatggctagaggaagagccaggaagagttagcagtgttggaatcaggcatgatttttcttgttgttcagctgtagtcagcttgggggatgacaactattgatttcaaaacatgattttcagttaagatcccttcacgcatatctttgtttcacagtaagttgtcataagggacaaatagttcagaggccttctagataaacatctgaaacaatccagtcctcctcctctgatgacctgagacactcaactgggggagtacattggggtctcctgagaatagagccacagacactcattgccacaaacactgttttctgcagtgacagccattcacctgcttcgtgccaggtcaaggaactagggcagaaggaattctggcaattccagaaagcctttgtcctagtgaggagagcaatggaaaacgaaactgtgctggcctccagcacatcattccccagcttgggaaaacagaagcaggggtggagagctactccgcaggctccctgacacgctctctgccttgtggccccactaaggttctactagccatgactcagcatcctgtggactcttaaggaagctgaggagggagcagcaagttcgcagctaggggaatcacagatggggggggtcacatatggggggttcacagaggggaagacatgtagaagaagtaaaagtctgagacagaacagctagggatcagtttctctctcccacagccaaggtcagctcctccttgggtgcctgtgttctttcttttcccctccatctctttccttctttacctccatttatctttctcctggtctccttttccttttctccttccttcttcctgtctttgttgcttcctgttcaacatcacttgcccagtgttaacccacaaaagatctggtgactgggagagtctcagaagcactgagacgctgtttcctaatgtggatcattgtggaagctgccagaaaataccaggctccacatggttatgtacgtacacacacacacagacacacacacacacacacacacacacacacacacacacacacacacacacacctctgccttacccctggggaacgctgtcacttttcctttggggaagacattttactctttcatacatactgacagctacagaaagaatacacaccatatgcatgagttaaaatccctgggtagtccacactgagctgtaggctcctggatccagggaacaatgtcaagattcaggttgtttaatggaatctcctcaatgataagttccaggctatcataagccattccagagaattctgacgccatgctggtggaggggaacaacccatatgcgccctaacccagtgacatcaagttttattgcatgtaattacacagagaaggggaggatgactggacgggaggccccgtcagtaataacaggctaggcgagaagggacttttgctggagaagttaatgggtgcccttgcacggatgatgtaaacatatcctctacagagtgaattggttggcaaattttgttggttggtcctcagtaatgtttgaaataatccctctgcttcctttccatctcactgctggtgcctctgtgacttcagccttggactgagaccataggctgccaaagactttccaaagactttccacctctcttggggtgtgcttgcctgctaagcataggctggctgtgctaagggaaaaatcatcacataacctctccacacacctacagtaagtagattatttttttttattttattttggtactggcatttatggctcctggcagtcttcacccaggtcccttgtaatcatgagccccactgctctcccaagcaggtctgactctctctggccatcagctgttcgttgcctacactgttctggttttgttttgttttgtttttttttgtctttggtttactctttagttaatgctatttttgtttactcttggaaaatttcatacatttgaagatatattatggtcatgtctattgtagctgggatttctattactgcaataaaatagcacaaccaaaagcaacttggagagggaagggtaaatttccatttacaactcccaggtcacactcagtcagctagggagtcagggcatgaagtcaaggttgaaacctgaaggcaggaactgaagcagaggtcatggaggaacactgcttactggctcgcttgtttgttttgctatacacctcggtaccacctattcaggagtagtgctgcccaaatgggctgggtcctcccttatcaaccatcaatcaagaaatgcctcacggatttgcctctaccagattttatgaaggctttttctctatcaaagttccctcctctcaggtgactctagcttgggtcaagttgacacaaagaatccctatgatctaattagtgctgcccatatgcacatggagcctggggaaagggcaacctatcagcagccacgtgcccagatcagagcaatcctcccttcctcaacagccatagttaatatcgcctctgccaagggggttgtgacccctccctcattcattctggaatcttgactggcttaaacttgtggaggtagccataggtgcttacacaactattcttcccttaaaaaaacaaacaaacaaacaatttactctgtgtccaagtgtgtctctgaatgcatatgtgtgtatcatattgagtgtctggtacctgtggaagccaggtaccttgaaactagaggtacagctgcttatgagccaccatgtactaggaaacaaagttaggtcctctgcaagagcagcaagtgctcttaactgctgagtcatctctacagccctgacaactgttcttatgtttttggttgtgtgcctagcctttaacagctgagccatctctccagcccaactattcttaattgtctgtgatttaaaaaaaaaaaaaaaggtaatctaatggcagtgcaagccatattcgccaattgaatcttccagatccacttgcctgtgaccgtactcttgagtccttttctagttaacacttcaggaaggatggccctgtactctggttccctgcagtgcttgcaaaggctgtgtcacctacagggaagttatccatacttctcatctggagcttacagaaaggggagttgatgtctattctgtttgggtctgacttctcacagtaccttatgcagagttcatcctgaatctatacacggttttatagcccacagacaggtaaacaggagcttctagagctcatgtacaacagggactaccccacggggacagacatgtgtgctccaagaccaacggcccattcatggaaggcactgcactgaggaggtgttagaagctgatgagtaaagtgaagaggtaaagagatagcagaggaagagttaagaccaaagcagggagttgctggggacctagctcacttggcagtcagtatatacatttcaaaccaacgttacaaagatacaggatggtggatgcctataatccaacacttgggaggtagaggcatgaagttcaaggtcattcttggtcacatggtgacttcaagatcagccttggctaatgtaagaccgtgtcttaaaaacaaagtaaaagccagacggtggttcttaatcccagcatttggaaggcagaggcaggcagatctcagtgagtttaactaacttggtctacaaagtgagttccaggacaaccaggactgttgcacagagaaaccctgtctcaaaaagcaaacaaaaatctgtgtggtttgccttgttacctgttcacccacagtccatgtgcccacagtgtgatccagaaccaggtcgtgtggcctgagagatgctgaattggtacccacacgctgacctctagactcctaggcccatgtgctatctactgtagtctgtttctatttgcagtctttccacaagatacttgtagcctgagcaccacgctcctgcgttatgagacattaagaagcaatctaccttcaaaacaattataccgtaggtctctgtccttggaacacacacagccacacagccatctctccacaccccatccccccacccccaccatttcatcaagtcatcttctgacttctcaatgttttgttgttagagtactctagagtctcctccctctcactgttcctttccttgtcactgatcccctccttaacccctaatcctctgctcacaggctgtgccagattcgcgctcggtgcctctgatgtaatgtctgtagtcttacatatgtagctatttatgcctgatgtttgaatggagcaggatgggttgggtccggtttacatttaattcctcagtacaacttgggtcctcgcaaccattggctaaatcaaatgccattttatcagtcttctgtctgagtttccttttccaaacccaaagcaatttccaaaactacatcctgatagttaacccttgtgggatacatcccaaatgtcctccaaaggcccaattgctaaaaggcacggtggttaacctgcagtgaaacctttccaaggcggggacagggctgacaagaaggaagttagatcatggtgtaatatgtctcctcagcttctttctgtgtgctccccttcccccatttcttttccacgagcagacctcctctttcattcccccacagtgtcctgtgctgccgcagacacaaagcaacacagccaagagaacagaggtttagaacttgcatccataaagccaagcaattaaaatgcatctttcctcctaagaaactgaccatctcagagatttggtcacagtgataggaaactcatacagtgttgcaccacaagctatggggaaaacatctaagtcagtttgcttgaagatgattatttaatcaacaaagcaaaacaaaattcaaacttgcctgacttacttaatttatttgaacaaatgtgggatgcacacagcacacaacacaaacaacacctctcagcaaggttttcggagcatgccttacttgttttatgtttttttttttttttttttttttttttttggtttttcgagacagggtttctctgtgtagctttggagcctatcctggcactcgctctggagaccaggctggcctcgaactcacagagatcctcctgcctctgcctcccgagtgctgggattaaaggcgtgcgccaccaacgcccggcagcatgccttacttgtagtgatagactggagatggcacccagagtatttctgtgggacatgagtgcttactgagacaaaaaggcacatctttggcaatgtcccatgcctaacctatattattctccaagaggccacaagaaagagatttaatgcattaaaaacagagaaggagctcacctggggaactgagggttgtacaatcaaatcccacacttttactttccattggcttacttgagtgtgaaaaaccctccacagttcacagatttgaacacttgacctccagctgcttaggaagggtggagaaactttcgctctgaaatgatgaagcaggacagatcttccttccttccttccttccttcatttcttccttccttccttccttccttccttccttccttcatttcttccttccttccttccttccttccttccttccttcatttcttccttccttccttccttccttccttccttccttcctcccttccttcctcccttccttcctcccttccttcctcccttccttcctcccttacttcctccctttcttcctcccttacttccttctaagctcattttttttcacaccaacagagacccaatagttgtttatttatttgttcatttggttaggtaggcatcagtgggcctttttgtatagaagttcataatcacatatttaaaaatattagattctgatgacttatcccagtccatttgaaaactttttgcctgtttcaacaatgaaaatgacatgtttttatatagtatgtattcatctttgagacagagtcttgttacatagtcttggctaatgtagaacttgctgtgtagaccagactagccttggactcagagagacctgcctgcttctgcttcacaggagttaggattaaagatacatggcatgaggctggggagatggctcaatggttaagagcactgactgttcttccagaagacctgagaatctgagttcaattcccagcaaccacatggtggctcacaaccgtctaaattaggacctgatgtcctcttctggcctgcaggcaaacatgcagagcacttgtacataaaatgcaaataaataaaaaaatttaaaaggtatatggcatgacaaccattttgtgtttagataactagtaattttttatttaaaaattcactgctgcttattatacaaataaaaacatttatagacattgcacatgactcaaacaaagcagaaatgtgaacaaaccatgggaatacttcatcttcccaattaccaccccttccttcagttaactatagtcaattgctattcatatttccagttatcctttatattatctatctacctacttacctatcatgatatatgcatacatttttaaactataataatggaactaaactatactgtactatacttccaattttttataatgtatatttttcaaattaggaagaagcttgtttcacatgtcaatcccctctccctctccctcccctccccccaccccatctaccctccactccccaggcagggtagggccctggacggggactccccaaagttcaccacatcatcttgggacaggcctaggccctcccccatgtgtccaggccaagacgtgggatgggctctcaaagtccctttttacaccagggaaaaatactaatccactaccaggggccccctagagtgcagaggcctcctaattgacatccatgttcaggggtctggatcagtcctgtgctggcctcccagacagcagtctggggtccatgtgctcccccttgtacaggccagctgtttctgtgggtttcaccggtctggtaacaactccttcgatcttcattcctccctctctgtaacaggttacagagttgagttcagtgtatatctgagggtgtctacctctgattccatcagctgttggatgagggctctaggatggcataaaaagtagttatcagtctcactataggggaagggcatttaggttatcctctccaccattgcctagattgtcagttagtgtcatccttgtaggtctctggaaatctccctagtgccaggtctctcctcagacctataatggctccctctgatatggtatctctcatcctgctcacttctattcttcccccaactcaatatttctgttcctccatttcctcctctcctttcctcttctcctcctctcattctggcagctccctctcccctaccctcatgctcccaattagctcaggagttcctgccccttcccattcctggggtccatgcatttttcccttagagtccttcttgtttcctagattctttcatgaagaggattgtaggctcttatgctctatgtctaaaattcatatatgagtgagtacataccctgtttgtcagatgtgggatcggtgaagatcttttcccattctgtgggtggtcattttgtcttactgattgtgtcctttgccttgcagaagcttctcagtttcaggaggtcccatttattaattgcagacctcaatgtctgtgctactggcgtaaggttcaggaagcagtctcctgtgccaatttgttcaagggtaattcccactttttcttctaaaagattcagtgtggctggatttatggtgagatctttgatgcatttgcacttaagttttgtgcatggtgacaggtatggatctatctgcaatcttctgcatgtccgaatccagttgtgccagcaccatttgttgaagatgctatcttttttccattttatagatttagcacctttgtcaaaaataaggtgttcgtaggtgcgtgggataatatcagggttttcaattcgattccattggtctatctgtctatttttgtgccaataccaagctatttttcagaactatgtctctatagtcggggatggtgatgcctccagaagatcctttattgtacagagttgttttggctatcctgggttttttgtttttccatataaagttgagtattgttctttcaaggtttgtgaagaacagtgttgggattttgatagggattgcgttgaatctgtagattatttttggcaagattgccatttttactatgttggttctaactatccaagaacatgggagatctttccattttctggtatcttctttaacttctttctttaaagactcaaagttcttactgtacaggtctttcactttttttggttagtgttacccccagatattttatgttgtttgtggatattgtgaagggtgatgtttctctaatttctttttcattggatttatcatctgtatatagtagagctactgattttttttagttaattttgcatcctgctactttgctgaaggtgtttatcagctgtaggagttccctgatagagtttttagggtcacttatgtagactatcatatcatctgcaaatagtgaaagtttgacttcttcctttccaatttccaaagatccctttgatctccttttcttgtcttactgctctagctagaacttcaagtacaatgttgaagagatatggagagagtggacagccttgtcttgttcctgattttagaggaatagccttgaatttctctccatttagtttgatgttgtctgttggtttgctgtatattgcctatatttaggtatgttcctattattcctgatctctccaagacctttatcatgaagggatgttggattttgtcaaaggctttttcagcatctagcgagatgatcatgtggtttttctttttcagtttgtttatatggtggattacattgatggattttcatatgttgaaccctccttgcatccctgggatgtacctacttgatcatagtggatgatttttctgatgtgtttttggattcaattcgccaatattttgttgagtacttttgcatcgatgttcatgagggatattcatctatagttctctttttcagttgtatctttgtgtggcttgtgtatcaaaatgattgtagcctcataaagagtttggcaatgtcccttctgcttctattgtgtggaacaatctgaggagtactggtagtagctcttgtttgaatttctggtagaattctgcagtgaagccatctgaccctgagctttttgttgttgttgttgttgttcttgttgtgaggcttttgatgactgcttctatttcattaggggttataggtcgatttaaactgcttatctgttcttggtttaattttggtaagtgataactatccagaaaattgtctatttcctttagatttttgaattttgtggagtacaggttttcaaagtatgacctgctgattctctggatttcctcagtgtccgttgttatacccccctttttgtttctgattttgttaattagcacgctctctctgtgccttttggttagtttggatagaggtttgtctatcttgttgatcttctcaaagaaccaactctttgtttcattgattctttgtaatgttttgctagtttctactttattgatttcagccctcagtttgattatttcctggcgtctactcctctgtggtgagtttgcttcttttttctctaaagctttcagttgttctgtcaattctctactgtgacttttctccagtttctttatgtgggcacttagtgcaatgaactttcctcttaacactgctttcagagtgtcccataagtttggatatgttgtgtccacattctgattaaattctaggaaatcttttttttttatttcttcctcaacccaggaatggtgcaatttggtgttattcaatttccacatgtttgtaggttttctgcaatttgtattgctgttgaattctagctttaaagcatggtgatctgataagatacagggggttatttcaattctttttatctgtggaggtttgattttgttgtcaactgtgtggtcaattttagagaaggtgccatgtggtgctgagaagaaggtatattcttttgtgtttggatggaatgttctatagatatctgataaacccagttgtgtcataacttctgttagatcctttgtttctttgttaagtttctgtctggtggtcctgtctagtggtgaaagcatggtgttgaagtctcctactataagtgtgtgtggttttatgtgtggtttgagctttagtaatgttgcttttacaaatgtgggtgccttcatatttggggcatagatgttcaggattgagacttcatcttgatgtacttttcctgtcatgagtatgaaattcccttcttcatctcgtttgattgattttagtttgaagtctaatttgttagatattaggattgctacaccagcttgtttcttgggcccatttgattggaacatcctttccgaaccctttactttgaggtaacgcctgtctttgaagttgaggtgtgtttcttgtatacagcagaaggatggattcagtctttgtatccattctgttagcctgtatctttttatgggcaggttaagaccattgaaattgagggatattaatgcccattgattgttggttcttgtttgttttggatttattgttggtggcattattgtgtgtggattttgccctcctgtttctttttgtgtttggtaaaattggattatctattgcctatgtttttgtgagtgtagttatcttcattgggttggagttttccttccagaactttctgtagtgctggatttgtggatatgtattgtttaagtctggttttgtcatggaatatcttgttttctccatctatagttattgaaagttttgctgagtacagtagtctggcttggcatccatgcttccttagtgcttgtagggtatctatccaagaccttctggctttcaaagtttccactgagaagttgggtgtgattctgataggtctgcatttatatgttacttggccttttccctttgctgctcttaatattttctctttattctgcaggtttggtgttttgattattattttgtcgaggggacttctttttgtggtccagtctgtttggtgttctgtaagcttcttgtactttcacaggcatagtcttctgtaggttggggaagttttcttctatgatgttgttgaatatgttttctgtacctttgagatgtatttcttcaccttcttctatacctcctcctcctcctcctcctcttcctccacctcctcttcctcctcttcctcctcctcctcctcctcctcctcctcctcctcctcctcctcctcctcctcctccttcttcttcttcttcttcttcttcttcttcttcttcttcttcttcttcttcttctttggtttttggagacagtgtttctctgtgtagctttagagcctatcctggcacttggtctggagaccaggctgtccttgaactcacagagatccgcctgcctctgcctcccaagtgctgggattaaaggcgtgggccaccaatgcccagcctatacctattattcttacatttggccttttcacggtgtcccatatttcctggatattttgtattagggatttgttggacttgagattttctttggtcgatgactgtatatcctctagggagtcttcaacaactgagattctctctccaatctcttgaattctattggttatactcacatctttagttcctgattgtttatccagtctttctatttccagcatcccctcattctgtgttttcttaattgtgtctatttcagctttcatgccttgaactgttttgagtacttccttcacatgtttgattgtttttccttgactttctttagattctttaagagatttgtttacttcttgaattttttggtttgtcttttcctctatttcatgtaattttttgcttgttatttttattctatttctttaagggattttcttgtttcctctttaaaggcctctatcatctttctaagataatttttgaggtccgtctcttcttcatcctctgtgttgggcttttcagatcttgccagtatggagtccctagattctggtggtgtcatattggtttttctgttgttgagtgtgttatttctctgtcttcttcccatcccttcttccagtgagtgcaggtggggtctcttcctctctccagtggcaggcggagggctcagcctctggcggcagccagatggcagagggcagtgggtagacaagggtggggtgtgtctggactcagggtgggcctttcctgtccgggcaggtccactcttgcctgggtgggctcaggcagaagccagcaagggttgattggggaggttggggagcagagcagtgcccagactcacctgaagctctggcgcctgccacaggacagagggcagagtatacttccaatttttaaatttttaatttactaatggattttggataagtttccatatcactgtacatggtatcacatgtattatttttaataattcaactggatctattaagatattttagttcttccaaatgatatttaatagtgagttacatattgaaaatgcaaaccttcaaaaaaaaaatcctccataaggcatagagttctatagctgacttttctggactaagactcaaagccatgagactttctacagccaagcaaccaaaggggggacagtaaagatttgaaaagcacaagaaatacatggtttgtggtttacacaaagatcagtgttatcaaaaagtgtgttgtgtgacggagtgaatcttgctgctttgttgtgaaggtagatcatcacaacctaagatcatcgctggggactgggtgcttctatttacttattctgtcatgtgtgcagctccaccccagcaaaaatgcaatagatataaccatgatagtatcacagttacatggccttcctggtgcgccaccttattttctgtgtgtgatacatgggaacacctgtgcaatttgtcttcatgactccaaataagtcatgttatttaggaatgctgggagtttggtgctgggtgtgccaactttccagtgaggccaactcagattgataaatttcttcttagtcactgtattattcagcttctcttaatataataaatatctgagagataatttatactggcttacagggcaagatttatattggcttacagagaaatagaccaagttcctttgaaggcacactgatgattagaaatctgcctcctagacacaccttttcaagttttcattacctcttagtagctaatctgggaaccaatcatttaatacatgagcctgttggaagatatttaagatccaaatgacagcatcattgtgtctatttagtctcctttttgcacgttgcagtcatgctgtgtagtattgctgctttccttaaatacactctgaaggtaatgtgcctagcacaggaccaagtataaagtttgaagcaactgaaagttctctttttctccatctaaatacccaaagaaaacagacattctccttctctcccagttggtttagagttcgattccttcaaagaattgtcacaaggtctagagatctgtgcttcttttcccagatcccatagagggcaggggctgaggacagagggtgacagaagctgacaggagggacactgttgacacggggaagcaaatgccgcccatttgcattcataatctactattctggagtggtaagatggcccagtgtcaaaatggattcaacagtcaatgagcacagacccctaaacccccctccccaggttggtgttcttcaagttttcatcacataattagatctagggtgataggttccaaaacagtctcgttaggtagctgtttggctacaaaactgtcttcagattctggggccaggtactggcagggcatcttcctaggaggaggaggaagattcagaaactgtgacttcctcgggtgattcgtattaatggctacaagctacatagatatttctctcccacactcctaggtgttctccactttcaaacactacagagtctgacttcatcagagaggaaaaaacatagcaaacctgacatctaaatgatatccacatctcagtgcagtgagtgggatggagattggcagagtctgctcatcttgggaattgcttgtgttgaggtgaggtattttgtaactcgtttatgaaaagctcaattctggtttgcatgaaagtgtaagaaagaaagaaaaaaagaaagaaagaaagaaagaaagaaagaaagaaagaaagaaagagacagagagagagagagagagagagagagagagagagagagagagagagaagaaaccattgggataaattaattgaccttcaacaacacagaacaagtgtgcacacaacaggttttactggcctactagaatattcgggagacatagcaatgatttcatttagtattttaggtttgaggaaactggtctgtaatattggctgtgtttttttgtttgttggacatgttagatgtcattaagggatcgatttcctgctgcttgctcaagagaaattgtcataattgaaccgactttctttcaaatccgagtttgtctatcattaggcaatggacaattatgggatgagttaataggcctcagtctgatggacttgggtgtttgcaagagaaatggcatggatgataaaatctcactgaataaacccatcggcaatctgccactcacagtcttgaaacaaaacttaactgcaaaattaaaagcattattgccagtagactgtgatgtttagtgtagtcctgattgctccttgtaatatgtgtattaaactgtttgctttgtattaaaattatattacacaaatatagtttgaagtagtttttgggtactgcttagccgagaggggccttgggtttagcttagcagactgacttctcttgacttattcactcccctttatactttaggagaaaaactacatgaacttttttttgtctgaaaggttaaaatacagtcattttacacattactagacactcatgaaaccaccacaaaaatgaagcaaaggagaaagtccttgatagtctccacttagtgtatcggctttattttggataggtggtgcattgcttttgtactgactggttaagaacaaagatcatcagaggtgactggatgcatcagagtgagagaaagtgcccaaatatgagaaggagtgagacagaggctggggaaggtatgatatagactacattaatgaataaagaacaatctcctgagatgcacagtccccagacatagagtttcacattctagttgggggaaaaataacttctgtccacagtgagttaagtacttatgctgactgaaggcatgtcaaaagacatgtgtacttcatttgtctgagtcatggcaggacctgtcaagctcacataatctggctattttcttttcttctttaataatttactcctgttgttttctctgttctctttctgccaccccccccatttcttaaactatctatttttcctctctcctatttcttcttctcttctttctaatataatcttattagctggcatgggcttttgaaaccccagtgacatttccttcaacaaggccacacctaccaaatccttttcaaatagtgccactccccagtgactaagcattcaaatatatgagcctatggtggccattcttattcagaccaccaaaggtgtcctcctcaatcacgttccatgttatttttgagacaaggtctcttactgtacctaaagtaaaccaactggatagactggctggtcactgagccctggggactcttctgtctccttccctgtcactgggatttcaggaacacaccacttgggtgctaggaattcaaagtcaggtgtacatacttgtaaaacaagcactttaccaacagagtcattttcccagcccccccgtctctctctctctctctctctctctctctctctctctatatatatatatatatatatatatatatatatatatatgaaacatacatatgtttcatatatatataatattttgtttataaatatactatcttatcagagactcatagtttcttaacaaaatatttctcccttttattttcttagttttcccttagttcaggaacatattataacatagactgggtggcttataaacaactggtctacttttcagagttatgaaggctagaagtcttatgtcaactgtcaccatggccactgtctggtagtgatagtctttggggctctgttcaacttactaggtccttacctggcatatagatggctggagagttttccggagtttctttctaagtgtgcttttcccactcaagaggactctgggccctgctagtaatatagtcaccccagaggtcctaccttctgaaagtgtcattctgctggtctgggatttcattatatgaatattaggaagctacacaaaatttcagcctgatcagcttctattttcttgtctcttctctttttctgttggtttgtttcattttggtatctcttcaaccctgaatcattttccagtgtgtctgatgactccttcttctctccatatttaaaaatagaatactaaaactcaaattataaatggaaacaagttaaagggaaaagtcttaaggcagaggaaatgtttgctacatgtaacaggataggggccaatatttattatatctaaaaggctaaattttgtcaagaagataaatattataataaagaaaaatgtcagataaccaatttataacatataagcattccagatgctgaacttgcaaccaaatataaccaaatataaatgtgcaaaacagtaagatgctgtatctgatatcaagctataatattgctgttcttcttgcctttggtgataattctaagcattggcaaggacagagaaaagcttctctcataggttactgatagataggattataaattggtgtttattttccaaagaataaatcacctacaagcattaatcctttgaaaaaggctgcacactttgagtcagcaatttaaggaaatagtcaaattttctaaagcctgtcttcattctagagttgtttattcctagataaataggatgcaatataacgtccgccattaagtgctaacagaggaagacgtggttacatccacatgaggtactaccaaccataagaaattatgtcactgtaatttaaacactgacagggaaaggtgttgtggtccactgttaaatccaaacagtaaaataggaggatgttgttaaaatagacatccatttagaataatatctatgatatagagggaaagaggacaagccaaggtgacatatataaaccaaggtaactacagaagataaaaatatggtgacttagtttatctgtcacatattttatagcactgggcataattttaggaatatcaaaaaagggggctagtgggaatgatttagggtcttgggacacatgcttgatgtttttgtcctgattgtcccttggtaaggtccacatttttttttttatgcagggtctctcactgaactcaggtgcctctggttgtaaagaagagatttactgatggggagccgagttttaattaatccttccttccgctagccttgtaatacctactaactgcgatgcctgaatggctctgcagtccctattgacttattgctgtcgctgtctcacagcctctctggcttctgatgaataatttccactcatacttccatttccagatcccgactctgtccacatttcttgttagtgaagtcatcgttcccgttcttatctcttattgattacacctcccgtctacctccattttcagacaatttcagaaggaagggacataaatatttacatcgaatgcagtgcatttaacaggaagtcctatggctatttatacacctagtcatcagtgtcactaggcacagatgtttctctgagggaggggctttgagaacctgaagaagttaacttgctgaagatggtgagcatgatgtcgcttgtgttttttacctgacctagccaggagctgggacgcagggctgctccttctcccctgactagcctgcctgtgccggaggatgcaaagagagcaagcagtgagcacaatatgccaatttctccataatagaatgctctgcttgcataggaaggaaactgcagctgctcgctacagatggcaaatagctgactacatccagcaggattcaatgaactatctcaagtgacaaggcacgtggaaagaggggagatgtgtaaactagttcctgcttccactcaggaaaaaaatccctgggcaattaacgtttatttaggtggtttttaaaatgaaaatgtctcccaaaccactccccaaaagtcaattccctaaatactgtgtccccaaatgcactaggacttaccaaggatggattagatttttcaggattggttttgtagcatatgttccaatgtctttcttaccacaaaaggcaatgaagccagaggtggtctccgtgtgtgtgtgtgtgtgtgtgtgtgtgtgtgtgtgtgtgtgtgtgttgacaaatgtgtgggtatgctatttatcattttgtacatgttcattttgcccccagatcttcaaaattagaagtttaacagtggggacatgctactgttttaataaattcctgtgtttttgaggtacctacctaccccccttctaaatgcatagtagagaatccatacttactagcttactggtgaactaactcactaaaaagagcggtgttgtggggtgtctactccctgccccaattacaccaagaacacatctggacctatgtggcaaaaccagaagaaacttggctaagaacttccaggcacaagaagacatagaccatgattgcactaatctaccaatcaaactcacagagcagaagtagaatgttggtagccggaactggagaagaaaggggaagggatcagaggtctttttcccttgtatttaagggattctgagtttcactttgggaagacagaaagttctggaaactgaccatagtaactgcttaatgttacacaactggtcactggtaaataaactatgggacaggggagtggctcagtcagttggctgagttgatggctcagggaaagacttaatcttgcattggaagaagaagacattgagtttgatcctcgggttccatgtaaaaataccaggctgctgatgcaagcttgtattccactgctggggaggcagaggcaggatgatccctggggatcactgaccagccagcctagcctactcagtgagtttgctacaacatgtaaaagattgtatcttaaaggaggtggacagcatccctgaggacacctgaagttgtccttatgcctctaaatactcacacgcacgtgtgaacctgcatatatgtgaacacataccaatgcataaacataatcatgtatgcataaacacaaaacaaatacaaatgctatattcaatttaaaaaatattttggctgcagttttttaagaaggaattctcagttgctgcatcagagttgatgccttaggaagatccccagttccaggaatatgtggaaccctgagattgttgccttgttccctaggaagagtcagtcacatatgcctgggttatgggatctgacatgctctaggatctgctgaagccggatgtatctgaatgaaacagaatgaaaacatattttgtgtgcatttcctaaagacccctgacatcacgccattacttaaacactgtgtaggagataacattaaatgacattcttaggctttgagctgttgctccatgcttgagttttttccctaagagatcccctctgtgttccggttggattggaagtcaagaaaagactgttgggcaaaggcagctgaacttcagctaaggggtcctattggcagagaagctgtttccatgacccttggttttccaagtctccaggatatccctcctggagggatatttccatcatattttatcccttcaaaatctgggagcagtgtgatccacttctgaagctgaggacatacattgtgtaatgacctatgatgttcatagtttaaaagagccaacatgagagtctgcaaggtgtcctgagggacagaaatgtccccagcttggtttggaggcatcacccacagaacattgaagccacaacaagctgcacactgaacagtgtgctgcatgggttgtgtgccccatacaacctaaaggaaagccattatcctggaccagcagaagagcagcgacctaaccacatcaggagctgtgaaatatgaggctcccagaggcccacagctggttttggtaggctgccatggtgactgacagaaagacatgactccttaaatttctggtcaaggtcaaacaacagagaccaaagtgagttacagaggtggtatccacacaaaccatgtgatcacagaggacgttacactgaggggaagcacagttcttctggttaagcagctgctatctccacacagccccacacctccacccaaagaagatgttgaagtctttaattaagtttccattcttcctcctgctgtccagtgatgcagagagatagccctcaagacatcgtatgataggaaagaaagcaccacaacttcccattttcgggatgacgcaagtctgccatcctctctctgaatctcctctctgaccactcctattcaaggtttaatgaaccgaaagccacttctgggtttcacattttcaaacctctaactgaacttcctgtaggcacctctgtgccccttactgggctgcacttccttcatacatctccttatgttatatggtagcacttcttctgccctcaggacatccctcagagctttcttccatccttctaactttcttaactgggcccaggcttctccttccttggagtaggaggaggtacacagcactggtaaatgctgggagataaagccagttccataacatttgctaggagaccaacaattagctatttcgtaactaaagctaagagagctcaaaggtcccattctttctaaccttttgtttgaagtcatttttggagatagagaaaggggaaaataggaggaatatctaattttgtgaatctcattttcaaattcaaatctccaatgtcccccgaggcagtggtttgcacagacaacccagcaatgaaaacttaataaaaggacccgaaagatcatagatcatattggcccatcagctgtcgcaggtaagggaacaataatgacattattctaatatctgggacatttagggttgtgtttcattctcagcagtgacagctacctcggttccaagctttatcattgtctccccagagctcatctccagtttcaggccatgtctgtcatagccattctttcttttgactctgtttaaaatgtttaaccacagcgtctatgtacagtggtgtcttcatgtcatggctccagtcacctcccctctcaggctctccctgtttcatgtactctgctaccacttatcttttcaaagcacaagtaagaaccccatatttgccacccttaagatagtctctggtttcctacagcttcgagaccaaaggttaaagccttccaaatggaaaaccaagactttaaaatataaacttggacttactttgcagcctcaccttccagctttgtggtcctaaccccaatctgtggcacagtccctaccaccaccagggtctctgtggatgtaatctttgagactcattacccatacattcttttctggaatattttcaatgtttctgcttggacaaagattctctgcaaccatctctgggaagctttccctaaactcctgctgtgagactctctacactggtgatatggccttgtgttagaactgtctacacgtacaggatctactcctgtcttcctgatatacttaaggcatatcccatactggggacccttgcttacacatgtccttcccctttcccatgtctgatgtcacatgctcggctcatgctaactggaggagaaagaattaaaagcaatcctttaagagaagtgggtttgctggccaccatctaccctggggcaaaggctgccttgagttcatgactgcacccaaacatagggtccacacccttttggctccctgctccagtgggggaggctggcctgtggcttttgttctgattgatcttctttttgaagtccaattcctcattggctcagagaagggaagttgactcataaatgaaaggaggtattgtaaactctacatctactgtggtctttttgtcttccagctgggtgtaacgacctccctaaacaggctggacaccccttcaccttgccctccaagtgatcaacccagagatgttgggactggcaagtgtaaccccagcctcaactccacgtcatgagagacacagagaactaaagttctgtcttcttctactctgctggaagcattaattaatgcaattctgtggaaagcaatttaggaaaatgtatctaaagtcttcctaccatttttcctttgatcagcatctcactttagtgagaaggggaatatatatatgtgtgtgtgtgtgtgtgtgtgtgtgtgtgtgtgtgtgtgtgtgtgtgtaatgtatatgtgtgtgtactcactcacaagatggtcatctcagaattatttacatcagaaaaatattgaatcaattctattataaagcatactgcccttaaaaataggtcttaggaaaaacatttgatgacatttgtaaaatggccatattaccttgttgattaaaaccaaacaatgccacctaccatgtttttcattctcacgaaaacaactagagactttcccttcctggccctgtgggtagtcttagtccaacaccggcacaaacagcctcagttccaattggagtttagaagtcccgttattctcagctcctccaccacttccttttcacttttctgcctctgcatgggaccccgagcttccacaagggtgtttgctggaggagtggcccttctgctggctctgaacagcatgctatcacctagtgctgccactctgaagttcctaagacacagatcctggactcgctcctaccctgactcaagtctgcctctctgcttgcagacactacctggatattggctctccagaccttgaaactgtaccggatacactcttgcccttctttgttttccagaatctaggagccttcattctctacccaggagcacaaagtgcacctgattccctatacattctgaccccaaaatgcttctcagaagcagaaagaggcagggaatatactagaagcagaataaatatagtccttaaccctgttcagggaatctccacgcagcatcccaggtacagatccttggtggctccttcccaagtctttggtgtctgatcctcccaggttccttcccagaggagctgcacaagaaaagatgggtacatgtggtgatggggttgggtgggggtgggggccgtgccataggattctgaagaccctaacttagccatgtccatgattccctctaggaaaaagacccaaagttaatgaccaactggtcatccagccaagaaggcataagctgtgaaatacagatgccctgacagagcctgttctttgaaggaaagagtcaggttggttggtgaaaatcagtaattctagaactcaggacaggcaagaaactggccacttcaaggttatctagcctttatagcgagactctgagaaaagaacagacaaaaacaggtatttaggttggaattcttgaagatcaatgccacaggacaaactgtggcgtctttgcagtcttcaaagcagaaggtttgtaagctgtacagctttatgatccagggcccctctgtttcccattgattcagcattagggagttactttgaccctttgtgtatcacacactgtaatagcacagcccccaccacggccatattaggtccctcctcccatggagaaagcctgatgaacacaccagacattaccagacttagccgtctctctgtacccactaccttgaatgtgtcagaaaccccatgggtctttgttggcaacgtaccggctactactccagtggcctacacaagcaataatttgtgtcttaagacaaagtcaaagattgcttacagagcagaaactcttgtgatcccaaagtactttcctgctcactgtgccctacaggtgagtcatggttgcaatataatcacagtgttgtcaggccctcctatcatggatgacttctggcctcagtcagagctgtccatccagatacatcttaaaagactctcaccagcaccagcttcagggtagaggcagaggcaaaggaccaaaaaatatttgtaaagaatattctggacatttagaaagaaaaaaatgttcagagaaaaagttcacgggtggtccgatcccgaagctgtaaatatactgagaaatgcattcatgagatgaggcacccaagggtggtggcaggcacagggtctttatcatcctagaagtgctcagcagcatctaagacctcgggttatcacagtgccgtgatgcttataggtggagggtgttgcccaagcagagttatcatgactcactcttgggaccatggtctattaaacagcagaactataggaattggtcagggggctgtggatgtgactctggtgtgtctagcatgcatggaactctgagtttgatctctagcattgcataagcaaggtatggcggtccacaccaacaattgttatagtgcttgggggatggaaggaggaagaccagaagttctaggttatccttggctacattctgagttcaagacaagcctgggctacataaaaattaatctggcagcttcccatgaacacaactttcaaaatttaaggcaatcctttcccacctgtccacaaactagtggaatctctcttatgtgtgtaaattcacttgtgaaatcacagcgtgggtttgaccccttccactttctgatgtcaaattttgggaacccatgccatgtgtatgccttgatcctgctggcagagttgttctgttggaggaagtaacaggattccttttgaatcttctggtctaaatgaatcatctataagctatgggttcttcaaacttctgcttcaattgtttttatttatgagcacttactaggctcttactgtaggtaaatggttcatgatgcagttgctacaaacttcaagcttctcagactcaaacagctttggaaggtgtattaaaacaataagcaacctgatccaaatctatctcacagttctctgtacagaaaagtcaaagatagttttaaaaatattagagtttccatggagatattggtggtattatggtgtggttagtctcagtattaattacttttcttatgactgttacaaaaccacctgacagaagctacataggaaagtaaggattcagttttgcttagagtttcatagcaaggaagacatggagacattcatggtggtgagagcagtttccatctataggggcaggattatgagatagttagttccatctcgacaggtcaggaagcaggccgaacgtggattagaatcagggctgtgcgtcatgcatacaccctctccttacagtttcacgtctatgaagaaggttctatgcactaaaaagtttccgcagcttctccaaacattgccaccagcagaagaccatctctcctttctaatgagtgtttcaaaaatgggtcttcagttttgtagcctggagcactgtgggcagggccttgcctcagtgcacatttcccattttcctcttacaaactgtgtttttccaaacggagcttaaacaaaaatcacagtacacagccactgcccaccacccccaccacttcgtctcttaggttcgaatctttaaacaccctcacactctgttcaccaaatggtgttatttcccacatttttctgatttactgttggggcacaacggcccttgtattcacagataagaactagggaaaccaggaacgctaatcactcagggtgtttccttcaaggaggaaataactgttttctgcccagggagctgggagtggatgccattgaagacccggggaccttttgccctcatagaggcagacctcacctgaatcccccaggaggtttacccccgacactccctccctagaccctcacctctcacttaatataacccatccttaggggagatatcatctgcatcttatggccggctgcgctcaatgctctctgggtcagagaccataccagatcctaggcctttaagctatagaacccaccttcattatccccagtacttgacaaaggagtttctatgtactcacacctcttgtgcacctggaattggaatgattgttgtctggaaacttcttttccaaattctattgtggttgtgtttaaatgtgctggcaataaactgcctgccatcaggctctcaaggaatttgatacagcctaagtcaggctgacccgagttttcattctcacctctatgttgatcatttctctgcttgccatgacacctgcagggaccccttcactttaccttctgttccctgccactataaacttgtctaaagagagtaaataagaaccatgccacagcctgaatgctgagctgttttggaacttcttctgccaaacaaattagtccattacttttgaactcagcctcacttagacttttaggacaggggtagaacatagataaatactttgtcagaatgtaacatggatgacctttggttaattccagatacagtcctttttctccaacaacactctagggttctcaaatttgtctgtttttcttacaaacaaggttaatctttgatctactttgagctgatgctggttacaatgaaatatagaaactggtttcattctactgtggttggccatccaatttccctagtactgtttattgaagagatagctcttttttttttttttctgcagtgattgcttctggcactttgctgagaaaatgatcagcagttaatgcatgtgtgggagctgtatgtcagttgcctgtgtagaagctattgagggtgatgggctgctgtatgggttattttagggttatcctggactggcttcgtgtgctgcaggctcttagtttgagaaggcatggatactgcaaagatggctttaggactgggtttgtgtattatcatccatacaggcaggttttgtggggagatgtctgcctagagacagatgcacacagaccattagctacatgcttgtctcctctgtgcaagcctgtctactctcggaaggatcgggcatcatgtaggtttgcaaaccagaggtctcagcctttcttatctctcagggttcagagaagctaaacctttgtgttgcagtcaccatgtgaatgtgttagcagggctgtggactctcaagagtggagaggtcttgtggatatcaaccaccatcgtggaccatattctagaaatgagccccattaaggtacagcccataaggatgcagaactgtagatgcttaggtgggggtgtcaagcatggacaactgcatttctgccctgtatcagtgcagcctcacaaaccccaggcacctttcctaatggtccagggactacgagggctacagaaaccccttgtggagttgtatacagtggcattgggaccaagggatgcctaccctcagagaaatctgtcttggatctgagctactgtgaatggggagaaaggaagtgaacagcaggatgccttctcccagttagagtgcttactctgctgagttgttaaggctcagaatctcgagccaccttgatcctactctccagtgcttccttagccggagcacacatgtattttccttcttgttgtctctttggccaccctgctgatgctgttccatgaatgtgatgtcttatggatgtcatgttgggaatatatactcacacgtatgcaaaggcatgtagaatgagaatacctccaaataatcctagcgagcatcaggatatgaggtcatggatattttttttttgttttgtttttttttctggtgtgttccataccttgaagtagtggcattcactttataaccatttataaagttactaatgttacagttgagggtataacacattgataaagtattgcctggcatgcaggaaacctgggttttgatcctcagcacccccttaaaaataatcagagttgagaggctcacccctgccatctcagcacataagaggaggggggtaggagggtcagaagttgaatatcaccctcagcttcatggtaagactgaggccagcccagggtatgtgagaccagctttcaaaaaggttaaggtctcattcatacatcagtgtgacagttaataatctgtcactttctatttgtttttcatgtgtcaggtgttatcatgcactccaaaaataaggatctactgaactaaaatgttggccctccatgaaagttaactaaaactctcacacccaggaggaaatggaatgcagttgaatgtgtttaatattacacagacaaaccatcagtagaactgaaacccaaaatctgtcttcaaaaatgaaattcacttttgtgggtacaggagaggccgggaagtctgtggaaataactgacccttgtaaaaggtcaaatccaagcctggcttcatttccacatttgaggtggtgacttaaaactgagtttgtattttccatctccagggacttgtttgtctctcacatagtaaaggtgtctggtaatgagcacacagttaaaagctattttgaaatggaatttttatacagccaattttttggttgcttaaagttaattgctttgtacctaattttagtcccacggggagcaattttgatctcccccagcaaactttatcttaaatgaggctgatctataatcttattacatgtgtctgggtgtctatcagtaaataccatagagtgtaccgtttttctaaaggtcactgtgtggttttaacattctccacagattttactttggccaaagaggtaaattgttttcctgatgtcaagccagtcattgtaccaaatgaaagttaggaaaagatgaggaagtctggattacctttgctcatccatcacagttgctaggcaacttgcaggagataccctgttctaaggatatgaatgaaacagtgctttgagaatagaagaggaacagggctgcaataatcacagagagattgcatatttccattagctagcctacagcagtcattctgaaagctcagccctggacctgaaagtatataggaataaagatttcaatgcaaccaaccaaccaaccagacaagtaaatgaataaatagacgcatactgaaaattcagattatctaatcaataaatggatgaatgaatagaggacatatttctcaaagataagtacaaatgactaatcagcacacacacacacacacacacacacacacacagagagagagagagagagagagagagagagagagagagagagagagagagagagagcgcatctgtaatcttcagggaactgcatatcaaaactacattgaaattctatttcaccctctgaatggctatcaccaaggaaatagaaaacaacaaatgccagcaaggacacctgggaaaagggcgctgctggtgggaatgcatcctatgctcattcactgtagaaaccagtatggagatgcctcaaaaactggaaatgaaaataccatatggttcagctgtcccattcctggctatgtttaccaggagggaaccaagttggcccacaatacagatgcctgcagacttgtgctcattgcaatgctgttggcaactgccaagctatgggatctgcctacatgcctgagaactgacgaataagaaaccgttaaagaggaaaactataaagaggagtacaataggcccactgcagggtgccagtggagtcaccctagaaagtagaccaaataagtttctcaggacaaacactcatgcagaatctagaaatacaaagatgtgaaagtgggcattccgggatactgttacgtaacaacaagaggggatgaggagctacaggaggtcgagggtaatgaagataatggaggataatggagggtgactcaggagtgcatcagaatatcaaaatgaagcccaacattctgtgttgatatatgcgaatgatacattttaaaaacagaatagtaaaatatggaggcattgtaatccttattctgtcagcacatgctgtatatatgtgtgagataatgtatcgaatcttcaaagcttatacagttaccacaagataatcaaaatcggaagagaatacttacttaaaaaaaaaaagacagtatactaatcattttgtaaaaatcaaggaagcgaggcaaaggatatatttactagtctgacttaattaccctatattttatgcatatatcaagacaccacactgaactccatagatataaaacaatcgtgatttttcaattaaaataatatcagttctcaggctggtgagatagctcactgggagaaggcacttgccaccaagcctgaagacctgagttcaatccctgggaaccacatgaagggagagagaattgattcttacaattctcagaagacctacacacatgctcggtccctcacaaatcaacttgcactctctgtgtcctgtctctgtccctgtctctgtctctgtttctgtctctgtctctgagacacacatcaatcaataagtatttcaaagaagtgtaaattccatatctttcaggtagaagccctgggtagcggtctacgtaatcacagctctctgagtgaccagatgagcctggaactttgagactataacttagaatagtgagcttatattgctctgacatagaattctgagacgagagtggtgggctatcagagaatttgtgtatttgtcacttttctgtttccgtgataaaacaccatgaccgaaagaaacgtatagaagaaagagtttgtttctgcttatgaatctagagagccagagtccacaatggcagaggaagcgtgccagcaggcagtggagcagaaagcaagagaatacatttacactgcacactcaggaagcagagatacaaaacccggcaggggagtgaggctataaattctcaaagcccgctccccactgacctgctccctccagccaggctgaactgataaaaggttctgcaactgcctgaacagtgtcactagctggggaccaagtgttcaaataccccagcctatgggtgacatttctcattcaaacccccataactcatgtgtgtcacctgagatgtggacacaggggtcagcaacaggaaatcgtctgttcaaaggtcacccaaagcctggaatcacagtgtcccatttcaagtggaaatctaaggcaagttaagtcagaagccagaagatactgtcaccagtgatagggacatagttccacaccacactggtggttagctgctgaaggtttctcttcagatacctctatgcaagacaagacaggttgtcatttttacagagaattgaattttgggatgagctaaccagaagcaaagcggggcagtgagatagctcaggaggaagaagtgcctgccgcgcaaaacgtcaatccaagtttgataccagagcccactgtggaaggagtgacacctgtcctctgacaccacacacacacacacacacacacacacacactgataaattgagagagaagagaaagacagagaaaggagacaagtggatttcgtgtgtgtgtgtgtgtgtgtgtaatggatatggacaatcttgtgtgtgtgtaaattacatctctaaaggttgctaagacctacccccacctcttcaacctttctcaaagacagtggtggtttgatgagaaacatcccccacaggctctggcattggaactttcggtcctccatctgtggtactgctgaacagacagtaacttgtgggaggcaacatggcactatgggtaggctttgagggctcatcatctcacccacttccagtgtgctctctgcctgtttgatctcttggcttcccgttcttgtcaccatgccttgtctgctgccatgattcttccccacggccagttcttttccctctggaactgtaagccaaaataaactcatccgtaagttgctattgggcatggtgtctcctcaaggcaacggaaaagcaactaatacaaagattaagtatccaaaaaggttaaaagttcagcaagcaaagctgtaaggtgaactgaggggcattatttagattcaggaaagagaattgaaagcggggaaactcaaggttacacttagtttatttgcagtccttgacaagatgtctcttgaaaacatgcgttgtcctgcaggcaatttggtttttaccagtggtgcctggagttttctgcctcctcctcaggacaggcaaggcaaacttcctttctcgggctctctcttatgtgttcccaatgcttttcctgcctatccatcctacctcagtgtggtgtgaagaagacaaaccacagcatcaggaagtgtgccacactctgcttggacgttatggacacctcttgcttggtgacatgttaaagttcttggagatctccagcgtgggagagagagcagcaaactcactgaagatggagcgaaatacaacagcactttcgttcattcacttgcacttgcatgacaaggcgcctagctaatggaactgagctcacagggtataaataggtgagctctgggtgacacataaggggacaaagggacctttcaggaaaacgtgatgactcctttgacactgtttcaacatcaatgaatagagtgttaacaaagcacctggtgtctctctctcaatggattttattgtagcaacggcagtggggagctgctggacaaaggaagccacgccagggacactgcatcactttacagaacccagaatacaccaagatgacaaagtgtggccgtggggactcaggacatttccaattccagagtacttggctttcactgtgaattccaataaccagagtgggattcaaaagtgacttaaaaattgtgtaatgatgaaacatttaactgaattggatcatggtctggcctctggcccagcttataggagttactagagaggatcagctgcccaagaaaaatggtttgcaaatggatccagggtttgagtcttcctggagcgctggttaggcacagatggttgagctgggtacccatagtccatgggatgtgggtgggccagagactggcactgcttgaagctcagaagcagaactcacgctgctagtcttgggagcacaatttgaaaacttctggagaagaaaaagcactgggtaacggtggcacattttgaggaataaaccatagaaagagaccctccattgcatatacctatgccgacttccccctgtcattggattttcacattcaagaatgagaattttcatgcaagggctgaggtgagcgcagtcaataaaacgcttgccaagacaagtgtgagaatctgaattaaatccccagaacccacataaagtctggtgaggtggttcacacttataggcctaatgtggagagatgggtagatggtcttactggccagcctagccaaacccgtgaatcccaagccattgagagaccttatctcaaaacaaggtgggtggtgtctgcttgacaaatgacaccagacgtcaacatctggcttcaataggcatgtccacctatgtggacatgtgtatatgtgggtacatgtgcacgcgcacacacacacacacacacacacacacacacatacacacacacacacacacacacacacacgcacgcacacacacacacacgcacacacacacacacacacacacacacacacacacacacacacacacaacacacacacacacgcacacacacacgcacacacacacacacacacacacacacacacacacacacacacacacacgcacacacacacacacacacacacacacacacgcacgcacgcacacacacacacacacacacacacacacacacacgcacacacacacattttagggaagcttttgatagctgtgcaaggttgcccactggaaaagtaaaatgaagtccacctccttccatctactcttaatctgcacccattttaccaaggatcaaaacaatgactgggaacaaattgtccctgacactatgtatcctgccttgggagctcagacatgtaggctgtttatttcaaagaagctgaagaaaaatactgtccttggctgatgctaatcatttccagtgcctttgagggtggcctcaaagaaagtgtcaccagcaccttcaagttctctttctttcttcttctttttaaaattttatgagatagctatgcagccctcgctagcctggaactcatcatgtagaccaggctggcctggaactcaccgatctatctgcctgcctctgcctccagagagctagggctaaactcttgtatcaccatacccttcttggttttgctggagctcaccatgaactcatagatgatgctgtgaccttacatcaagaatatcttgtccccagaaacactagcagatccagtattggtgtggccttatgatgaagcagaggctgtacccaaatgctggagtaagcgcacacacagacagacctgagagcagagacaagcccccagcttgccacgtgtttatagaacttgatcttctctgcttatgtgtcactatgccactcagctctgagtactgactcaatgcactgtcaggagtcccctgacttcccagtgtccagtgagccatgtgacaacattcatttgtgcagatagaggatgggagggacatagcagaaaaggtggctagttcacctcagcctctagcattcgaattttcttggctacattttgctaaatatgactcatgaggaggacaaaaggccactagcttgtggcataggaggtgacattgttcctgttgttgctgtggcatttgacccagctaaatcacatccctagctcatagaggaggatgttatgccaatacctccatcattatgggaaggggctctgctggggactcctgggtctcatttcattccatggctttcccatcctgtgccatgacttttatggcgaggcacactgaagggcttgacaaccagggtcatatctattggtcaggggtcaactcaaggtcactcattactcatgcatgctcttccatctccttgattctctgaaatcagcctgtgttttagaaaatgggctccatgtgcacagccctgtggtccaaacgactgtcaagaccatcccagagcaggcggacctagcttcctctaacttcttgacctggagtgaggtagctaagtcatccttgtgggtaagacttggctgtctgaattctctagactacccactgcagttagaaataagtatgttttatcgcacaaaacccataagcaaggcatgtgcagtctccaggtctcctcagccccaaccccagtcaactctttaacctgtgctttcccatgctggttcccctggagccagggcttctcaggggctgcagaggcttctcagcatgagtacaatgtgctggaagagactagttaggcgatgaatgtttctgccagggtggggccagctgttaggagaggcacaagagtgagaagctaagccttcacatgctccttcacataaacacttggcaccaagctctcccagcagagccgtgccagaagatgagcagggtccatgggaattggaggtaagcaattcttggaagccagggcaggcagccagctctggtaggtttgcccacaggattctgggcccagtactgagatcttctcctgacactacctccaagaaggagacaagtacacacaggagcaagataaggataagcataaaaatgagaaaaatccaatatgctggttccctgggagaaggttaagaatatgagttctgtgtctcagtggtcagttactagaccagagacctgtaggtcagcccaggaggggcccatggagagctccagggctggcaaaggggaacggtgatttgggtttactctgcccagctgccccacataatccagagagtgacttgatactggggtgctcagcttggagcacaggggtaggcagatgttggaccagtttctgaattctgtatcttgaagtcatgctggctttaggcgctgagccctgaagtcatggcaggtggtggtgaaatcatcagctctgctgtagatatgtgggatctaaggagggtaagtgctagtcaggctgaaacctcctcagcacacaattgctgagagggactggagagcatcaagtctgacctgggtacccagacaatcatcttaatttaaatcactgtttggcccaaacaaacacatgagcagagctcatcaaaagccgtagatagtcaccctggcagggcaccaagggcagcagctggtgtcattgcaatggagacagcttcttgttccctccaagatgcagctggggcttctgatttcattctaggaagttctgttgggtgaattaaactggagtcatcttgctttcctggggacctgctgctccttttgttcaccatgcctctggccaaacctgcagcccgtgccattttctaccactttaatgacagacagacagacagacacacagacacacagacacacagacacacagacatacacagaaacatatttgtcaccatattggggacctggggtctcaccttcttacctaaattgttttggattttaactacatttgctgttgttgctgtttcttgccctctttgccttcagttatgtagaacaatggacgaggttttgatggaagaaatagcaaaaatattaggccctttggggttgcttggtggactctttttccatcatcttttgatctgtccccacacctgctgctaaaagccctctgtaaaatgactgaggccatgtgtcagaagcaggattactaaatttgtcatgtgctgtcaccagtctttcacctgaccattttggacagcaccaacaatgacctttattacaatcttcttggacactctaacaggtaggaaacagacacccctgacccacaactgggaacaagttccaagattttttgattcatatttttaaacgttctgtacctctggtgaccctggtcctggcttctactcatcttctttataaatccctcaaaatggaagcaggaaatcaaaagactgccaccaaggaagaggaagctgataatctttgaatctaagagatccaaggacaggggctcttaaccctgaaggtaaagattccaggagtaatagttgttccatggacaggggaccccacacccaagcatctttttgaactagttttgatgatggaatcttggcttgagaatacttctgctttttgtgtgcatactagcctttatgtatggccaaatttgcaactatgaacagctgttctgtgaatgctacttgctacttgctgagcaggtggccagctctgactctgtgcccttccttggtcaccaggctgtcctttgtagcagcaggacacaaacgcactactcttcacaattgaaccaccatctttctttgcctctgagtctttgccccttcctctgaatgtggcttctactcagcaaatacacaccattttgatttccaacgttgccctcaaattttgaagacgttaatgtacgttgatacattaaaggaagaagtgacagttgtatcagtttatggttgatagcatgatgttttaaatatatatgcatgtagatctggagagatggctcagaggttgaaagcatgtactgctcttgtaggagacacaagttgggttcctagcatccatgtcagatggctcacaaccaccaataactccagttcttgaggggcggggatcagatgcctgtggtctctgtggtacatgtacttacttgtacatacccaacaaataggtacacatataattttaaaaataaaaaggaaaatggatagatcaagctaactaacacacatgaccttacatacctgtgttttgggtgtgctattttgtgatgaggttaaatcgttaccttttagtaattttcaaatacataatacattgctttaactatagtcattatttcatgccatacctcttgaatttacttctccaatctgaaaggtagcttttgacatcaccagatgaatctgatgtcatcagattcaagcacgatttccaatatcttctatgcttaacactgccactccttgtttctaccttgttacttctcaggtatttggtcacatggatggtaaaagtaacagaggtttcctatgtttacttgaagaggctagtggaagatgaaagtggattgtgattttgcaaagtaggggctctccgaagatgaggaaattccagtatccatgctgtcacactccacaggcttcctatggttcatgggcagcagggagatgcggaaacacccaccctccgtttcctgctgtaagactgtagaagcataagaggcatataaaggatagtacatgtgtctgatatggcatcagcatgggaaaagttggatgcccatggctgtgtatgtgccggatccagtctgcacctttctgcccactgccagaaactattcggccccatccttttgctctcggcactgcctggaaatatttggaaaatctcccaagtcatcctttgggtgcttgttgtgtcattcccatagctttcatctttccttgggtatttgatccttctaccccaagccgttggagcttggtttcttaccattttcaataacaactactgaaaataggtcttataaataaatccacagggtggtgtactttttctgataaagtacttgtatcttatcaaataaataaactaacatttccagagttcctaatgagttccagcctctgctgcagtggggaattattacccaattagacaaagaaaatgactgaagggccaggtctcctgcaccccagcagctgtgacacacaggtggtggcttcctcctcctgtcatacaggtagacctatctgttgcttcctcgtgggccatgtgctggtctccagctccaaaagtcattctgagaaaacccccagaacctctctgtagatttcttttcttcccacaaacacccagtctcttctgttgacatcttctcttacctggtaacatggttgttccttaacaaggcctttgccttatagactgaggcatgggaaggaccagtttgtagtgagccttgccttgttcacagatggccccatttcatcccaaagcacctcttataagcattagacaccatattgatccacccataatgtccacccatatacaacaccacattctactcatgatatcacccttccgtgtgtaatctatttgcctgcaggtgttcattggttccaccttaaccaaattatgcaaggacagagctcagcatgtcacatagcaagcactccgcataaatcctctctcttgccatcacattcccttcagaacggacacttggcgatctacttctcttcatgcctcctccatcagttccagcccactcagttgctggtgtcccaccctccaccccaactgccccttatcccttctttcatggggtttctatcaatggcggaatggcagcattaagaacagatctagaactactttaagaattcatagttatacaaatccattatttctattgctttcctagccatcaccaattgtaatcacatgcccagcatctttaagcttgggagatctgatgacaatggcatctaaggcactgagccagttggagcctccagccttcaccttgcttcctgtcacttaggattctttgagatggcactggacaccgcaggatcttgttaggcctggtttgtctgaactgtgctgtcattggaaatgtaatcacctccagaaatcacggagcagtgcctcattaattccagtccagatgtgatgtcaaaaaggctggcaacattcaggtgtgatgctctaaacagctacttaggatgcctgtctgcatctaaggagagaggtaagagattcagtagcctgtctttgagatcctaaaagtaatttatcacaacataatgagagtcagagggaacttgattttgtaacataaaacaatagtgacatataaaccttcagaaagggtaggaaaggcacgttaagaaggactgctttgggaacatttattcatagagtgaatgtagaataaatgcacaattacagtttagaagacagtttagtcagcagagtgcttgccatgcaagcatgagggcttgagttggatcatcaggaccctcagtattctaagcagttgtgtgcttgtaatcccagtgcttgggatgtggagacatgccaaccccttaggctcactggccagccaacctagcctacatggtgagcttcaggtcaatgtgaaacccttgtctcagaaagaataaggtagatggtgcttggagaatcatacctgaggtagtcattgtctttaagctcacccacacacgtgtacatacatggagacacacatgcgtgagtgagcacagacactcaaacacatagaagtgtgttattatggaaagacagatggtttctctggcattttggtctcaatgtatctcgtactatttccttttctttcccctgttttctttttctttctctctgacattcgtcctccttaatatatatagtggcatccatctattgctatttaatagtgtttatttattgaataagaaaacaaaacagacccgcagaaagacaagccaggtcactgatggacttcttatgcctggctctgttcccaactcacttgcaacagtcctagattcattttgtatggtgtaggcattaagaccacgtgggcatagccttaatcctgatttttttgtcttgaatataacttcctgcaagaagcataaaaagtagctgaggaactgtttgatcaccaccaacaaaaccctaaaatctgatatacaatgagggagttgtttaattttcagaagatcatgtgccacacaccccatgtcttggtagaaaggatgggacacttgtatggaggctgagaatttgagaagacagccaagtgaagtttctgccccgactgttactgccttggtgtcagtatgacaggagctactctgagacatgtctagtttaagtgtttggaatgctcagactggggaaaggctgagttgcctggtacctcagatgtagagagaggtatgtttctagtggcttcaaatggtggtacattccatgagttactattttttagagatatatacaggcaccaagatcatgtatttcatccccaatctgataacttaacatttctttcaaaaatccaggtcttctatacttatccagggggcactatgtgccttgagaacttgacttttttatgtgttgtgatggacaaattggtagatagatgctaacatcaataatggaatacagagattgtaaaggccagcggtgacagatgacatcaaggaaacagtgtcttctgaacataacaggattgatacacaatgaactcacaaagacaatggcagcccgcacaggacctgtgcaggctcaaagcagactaagcactaaggagaagtggacacaaaattaaacccctaaccgggaagctatgtgatattgatgaatacagaaaaaagaaatcagttttctttaatggggtatcacagggtatatcagccacattccaaggcaggcccatgcccagagtagagttagaagacaaaaatatgcagaatcatgagggttgactgggcctagggagaggtggagagaaagtcagtgataaatgccaggttagagggatcaaacccaaggaatgcattgaattgggtatttttgtgtgtatttagccaaaacgtaagaggatgcaagcagaagaaattctaagttatatttgataccaacacacaagtaaatccattcaattgacaatttaaaaacttcaaatcagtgtctgtgcaaaggagtcccaccctagcatagacgctggcctttatctgcagcagggttaccctgagagagggaccactgagtttaatggatatggtcaatctacagaacttcagacccagtgtctcactagggaggccgaagactgtggtgcttggaaagttggtgtgggtggaggtacaaccatggctagtgacatgagggcaggggacgagctgccccagagccttgatatctagatatcaaaccaaactgttgagcttacttgcatctaggcttggaatctccctagaagcaagacactcactgtgccgagctggggctttgccaaatggaaggagagcaacaatatggagctccatttgcacttccagaagagaggcaggcatggccagtgttatttatcaagcagctgcccctctagaatagccaccgtgtttggatatattaatatgattaataattatatcaactactaaagttcctgggtttgcctagttctgctaatgaagaagaaaagaatcagaacaattaaaaaaaaaaaaaccactggaaaaaagtaaaaaaatgacccctaatgacctgttaatatacacatgtatcaaactgtcagccctcacagaagcctcttcttgtagtagaacagtaactgaccaagagatacacaactacgcagtgtgcagagagtcggagacgatggagcacacagccctaaatgggatgtctttatcaaaatctcccctcgaggcccagggctctatgtgtgaaagaggtagaaagattgtaaaggccagcggtgacagatgacatcaaggaaacagtgtcttctgaacataacaggattgatgcacaatgaactcacaaagacaatggcagcccgcacaggacctgtgcaggctcaaagcagactaagcactaaggagaagtggacacaaaattaaacccctaaccgggaagctatgtgatattgatgaatacagaaaaaagaaatcagttttctttaatggggtatcacagggtatatcagccacattccaaggcaggcccatgcccaggagtagttgctacaacaacatgggatccatgttttgttttgttgtggacttttctgtcttaatggtctttcagtttgtctgttttgattttttacttttgtttttttatgtttttgtttttcctttttttaaatgaaagaacataaagttgggaaggtagacaggtgtggaggacctaggaacagttgggaagagggaaggcaatgatcaaaatagactatatgaaaattttaaataaaaagctcaaaagagaaaggccatttgaagatgtagggggacagaaagccctaaaactttgctgggactgttgatacagctaagtgggtagagcacttgcctgctcagtgccctgggtttgattcccaggtccacataacctgggcatggtattccatgtgtgcaaccctaacactcagctccaagaagcaccaccctcctcactcacctctgctatctgccctgctgcctacaccaacagtgtctaaatatcttacctcctcactcacctctgctatctgccctgctgcctacaccaacagtgtctaaatatcttacacactcaccttctgagaatgtatctcataggtccaaaccaaggcaggtttctgaaggggtaggttctcccagctttgggatgcatgtctgatttggattcattctgcttgcccgcttgtctctttctgctgattgctgccatgagtttgttagtgtgctggtttcctccttagctgagtatctggctcaccagaagcgtttgcaggtgacttcatagacaccattctttaatttggggctgggacatctgccatctatttcatccctctcttgtcatcagtggttctgcaatcaatacaaataatattcaaaggcctttggctataggcaaatgaagccagcataaatcaatgaactattgagctctatgccacatactctgggtactgtgtaattccatttctctggctcccagagcactcctacagactccaagacttagttttgaaatcttcttgcctttcctaacttagctcataatgatctcaggcagaaatttggacctctgggaaaagatagttgagcaatgagagttatggggttgcctcagccttgatgaaatctggactgtatgtagtgtgacagaatgcagtcagatcattctaaaagtcatccctttgacccactgggataagaagtatagttcgtgttcctttgcactagacttggaactcattccacatttctgcagtcagagttaaggatatgacatatttagtcaagcgcttgctttataagtatcgggatctgagtttgatccccagaacctacataatatatatgagtgtggtgttaacccagcactcgggaggtaaaaatgggtagttccctgcagctccctgggcagccaggctagcttacttggtgagccattagccagggtaaacaagatggactgcacttgagaaattatttccaaggttgacctctggcctcaacacatgcgcataaacacgaactcgtatgcacacacacatatacatgtacatgtccacacactcatggatttctgcagttaatacccaggaatatagattttaactgtgcttcttaaagattgatttttgttttaaataaacatatcatatatatatgtttctgggaagggaagcatgtgcacatactatatcgatatctttagagccaggagtattgtatcccctggagttggagttataggtggttgtaagccagacatgggtgctaggaactgaactagcatcctttgtaagagcagtatgctgtcttaaccactgagctatctctctagcacccaggaatctaaagtgacatatttaggggtggcatgcccttcaccccattgtcagcaactatgaactagggaagagtgtagggagacaccgtaaccatgcctcctaagggctgactacaggtgtgcctgaccacacctgtcaggcatgatcaaggtgaggtcaggatggtgcgggataggtttttaaggggctgcaaggcacatgagagtccttctctctggcctccctgccttgctgctcctggcatgctctggcttgtgtttggcaggtgtttatctgaataaagatatcttaaccttatggactacggatcggttctcgttatagaggagcttacagtctgggtgtatggtgaatgagtggggagtcacaaccacaccaaggggtctctgggattagcaggagctgaggaggccaaatggccttagaggttccatgagcctagagaagaagacaggaaggggaagcagaagagcccacacacgagatggggagagggtaccatcttcacacaggcagctacaatggcagttggattcacattcccactgcttctagaggctttagtgtaaaaaagtcagtgcttacagagcataaaaggctctgcatgcttctcttcaatatcagaaaatatacctgtccattttttcttcttttaaattgaaaatggatttttttcatactatgtactttgattacaatttctctaaacccacaccttttctctctttgttctttctgaacacaacaccattagcacaagcactgaggtcagcaatcgataaacggaacctcaaaaaactgccaagcaaggagtgtgtggtttcaggccttggggtggtttcagtttaaaataggagcatgacctgacctcactgaggacaaggtttaaggaccggacagagggagtaggtggagatcaagaattctggtggaaagcaagtaaggcgaacacatgccttgctgtgtgacagcaaggaccagagcatggtgctgagaccacacgggtcacctgtggactctcatggtcagttactgacccacaagctcctttctgtggttctgaaaggatccattcactcttagcagggccctaagttcagtcatgctctcacaggcagtgaattcggtgaaacagcaccatctcagcctcagtgaggaatctcagcttttaccaaaggtctataaagcagtgaattaggttcacacacttggaatagctttgtctctcggtctcctgctcctgtttgacttgcatgggggggggggacctggttctatagacctctgttaattgcacttcaacctgtggcctgtttttcagttaagcatttcatgagggaagccacatgctcaatctctgtgaccctggaatcttccagccactctgaggttcaggaggaaagaggagaaaggtaccccagaccaaaaaatatatacacatttcctctctcagttgtttgggttctggtcgctaggtttgctactgataggtaagacaggacccacacatagaaactgtcccttcatagtaaaccacatagattgtaggtgtatagatcagcagaagaggtacatgcttgggaaatatgaagtccccgttttaccccccccacacacaccaaaaaaaaaaaaaacagaaatcagataaataccatagcaataaaagcaaactgataacacagcacagtggagaggcactatttcagtgtcaaacctttgcctggggaagcaatgctttatttgaaaagctattttgagtatgctttgtttgtgacacttgatttattgtatgttattttattcagaatcagtctcagccagcattttcaagggatcctaagtatctgagtggaaagtttctatatgcatacccacatatgtaaacacacgcatatacatgcatatgcaccctgtgtgcaggtatacacacatgtaggcatgcacgcgacacacaagtacacttagacatgatttacaattcagcacctacccttcctcagcctttcaacgactccctggctctcagcatttataatcaggagggacagtctttgaaattcagttccatcagagtctttaagttgtcagcaggcaaaattccccctaaaacctttgtctcccccctgctcacctcttgcctctgtgagcacacagactgataatcacccagcatgccatgtgattggcctgtcatttcacaaaagggggacttttgcaatggggactttgccactgaactcgaccttcctcctaagaagaatttccatgctgagatcctcaattttcctctttttttaaaaaactatttgagcaccaaccagcaaagtgctttcttcatacatttaaggggaatcccacagaaaactcaatatttcatacccgctctactctgcccacctccactcaccgtgtgatgtaactgggcaaatacagccccccccccattattatgactcagggaagatgggataggattccgtcctccccttcagccatccagcctgactgtcagtgtgaccactatccaagtctaaccctgggggtgcacatgaaaagctcagctcagtccccgaagaccaagcagacctccttccctttattccttccctccatctgcccacctttctgtccttctcttctttctcccttgtctctattcccctccctcttcttttcctcctcttttccttcctcccttccctccttctttgcttcattatttattttgagatggaggtcttactctgacacaccccccctccccacgctgattttgaatctgtgaaggtaaatgtgatcctcctgcctcagttcctctgacaccgggattgcatgcacgtgcacagcacagccttagtcttttctttccaagatgccccctctgctctttgtctctgcctatttcccccgccagcagcagtcaccgctgcctccatttggcatccacattctatgaggtcatcttcacaccactggctgttcgcttcggcatgtaaactcgctggcagtgactcaatgtttacgaccatactaacctatgaggatcatggtgtggaagaatgaagcccttgctggcgccaagctaagtgtagacatgttcttgggagggggtcagggagagggagccaacagtaggatgatggggatacctgtgttgggggagagacctctcttcagtcctggcttgacatctagtccagacaggaagaaaatgacagtcatgttcagtctagctcgtgctatggcttggaggaggaaatggagccgtcttgtccacaagccaggacaagcacgttccctgtagccagtgcaaagtgtaagggatgtacaaggacagctctgcaagagaaatatctaatattgctccctgggggctgaataaagcatgcgcactaaaaatccatctttctcctaggctgagaaagagcaaaatgaaatccccttcgatatgggttgggagctgtggtggttaatactgtcagcttgacagcatatggaatcaccactggaatagcattgagcatacctgggcatgggtttccaggttgggttgaagaaagaaaaccacccctgaacatggatggtagcattcatttcatgggctggggggcccactgaataaaaaggagtgccaacgtccatctttctctgctcaccagtgcaggtgcagtgtgaccagctaccttacactttggttagcacgctttctccaccatgagggactgcattctcaaatggcgacttgagaaaactcttcctttcttcaatggccacaagaaactgaaataacacagagggggtggttctgagggttcgaatgagcagacaggcgggtgaatcagtgagatgttgcaaccatctctaagaccagtgagatcacatgttttgtctgcaccacatctcacatgcacacaagcatgagacacaactcataattttgtctagaattatcatggtttcttccctgggaggaggggtcttctgacttgctgaatggagcaatctcttggagcctcatcaattcttatcctaatttcaatctggtcattaaacagcctctctagttgactatttagccatcaaatatgtggatcaggatgacactgtatccctctccgggagttggtaacttctgagatattttcagtgatcagtgtttctggtgacagtaggacattccatgatccctcagcaactttggtagctagagagagtagtggctgcttactttgtcatctgtgcacatgtgttagtctgggtcactgagccatctctgagtggattgattcatgtgcctgacaatgccacccaagaaccaaaagtgacatcagaaaataatctctaaactgtgttttgttttatttccttatttgtgggggtatggcccacatgccagagcatatgtgtggaggtcataggacaacttgcaggaactggttctctttccaccatgaaggttccagggatagaacccaggtcatcaggcttgggagcaagcactttgcctggtgagccttctcaccagccagagtgccgtcttaagactcctgtcagcaaaccacgtagtgtaagctgagaggtttcccccatgctaggaggattccgctttcccttggggtacttacaggaagaagagcctgccaacttcaacactctacagtacaagtttcactctaaagaaagtaaaagtgatgtgagtttgtagccccatggtattctaacacatttagcagaacttttatatttaaaaaataataattgagctaggaagccaagcatgtcagacagatgaaagcacagctggcctgttgattatgcaaccaggaaccagaaccctttcagataggagcctcggggcttcacaggcactatcccatggaaaccgtgggtctttctggacccactcctttctgatggaggaacaagtgctttatacaactggaagaaactgttatgcaagttgcaactggcaggacctagactcaaaacattcctccaatttgtcactacacttgggtttattctcccccaaaccaatttcatcacagagaccatatggtactcatgttcaatcatggcaaaccctttttcccggtgcctccaaagccaatggtttccactgtgggggaaaaaaatcatcaccaggaagacattgttcttctaacagtcatgttgcatgctcaaatgagtaaaacatgaaaaattataatgtgtttcaacctgactattctttccttaatgactcccttatgtctagacctagtgatgcaccccaataaagtctccacccaacacatagtcatgctggcatcccagaagcacaagctggtactgcctgctcagcatgggcccgctcctttctccattctgattaggtctactctccctgcacccctaaaagccaaaggataagcatcaggacattgttggatgcttgcacatagttgctgaaacaaaacttcacacttggctttgaagagcagagggaaaagtctgtatgtctcacttattactaaattgtcactcatcaacagcaggcgaggaagtgtgctttaaggggaccctgcagataaacacgtcaaggtccctgtcaagacaggtggcatctgaatctctggaacccgagctaatgctgcctcagaggacttggagttagtggggcatttattgcacagccaatgacttgtaaacacaccttgtcactacatgtgttcaagcaattactgggcaattatacctgcaaagtacctggtaattaatagaaggagtcttgtgtgggctgccatttgggaagcagtggggctgttctctcatttcactggaatgatcatgtcctctggagaagacctaatgccttcaagaaccattaggcgagggacccacttataaagtaactgaattacccagaggagatggctctgactccaagacagacccaagcagttcttcccaggtaaggagaaagggatgatgagcagagaaccatgtccacaaatgctacagcccaggtgtacatagggaaccagcacttaggaaacaaccacagggctttgcatcaagcaagcacccatgagaagagatctgccaggctcgcggccctatgtacagtgctttctacatatggacttgtttcattgtcaagcagcaagaaaaacattattagcataatttaaaatatttatttattaattttgactatgggtatgcatgcatatctatgtttctctgtgtgtatgtgcatctgtgaatgcactgttccccgaggccagaagagggtgttgagtctcctggagttgggagttgcaggctgttttgagtcacctgaagtgtatgctgaggacaaacttggttgcacatgtgagcagcaggctgccttttcctccctgctactttctcctactactgatttataccccgggctcctgatacacaattccaggtgagtgaaatttatccatgcacatagacattaaaattcagtttcacgtatttataatttacagtcttggtccatgtatgtagctaaaacaaaatgtgaaaaccgaggtggcttttaaatcctgaaatctggaaacacaaggtccatgtgccggctgatacggtccctgggacaggctcacttcttctcacacggaagaagacataagggtctcctttatgagagccccagccaaaggtaggagggacgtatacttctgactttaatcactactgtaggggatgctgtagccacgcctgcttaggggctggctacaggtgtgcctgaccacgcctgcaaaagggaaagtttaagagtgagggatgctcaagtgacagccctgctttcgctttcatcttcagcttgctgtacttactgctgccctgccagctggctaggttgctccgtaagtaaggcttttccctattaaattcccttgtatttttacctgactccatattggtaattcccacattacactgccctaagtatcttcatggaaaacttccaccaccataggaactaggattttagcatacatttttagaaaacggttgcggggcatttgcacactgtgaagatacattagtgtcataaaaagctgagtgaccaatagctagacaggaggtgggacttcgggcaaagagagaactctgggaagaaggagggcagagatgccatccagactctgaaaaagcaagatggacagtatggggatgaggcaataccatggtggcagaacatagactaaaatactaaaataaatgggttaagttataagagctagtgggacaagcctaagataaggctgagctttcataactaatagtaagtttccatgtcattatttgctgactggtggtccagacaataaagcttactacagaaaacagaaacctccaaatcatggtaaccactaataccaaattctaggaataaaatggaaataattgaaattttaagatccctattgactgcctacttgtttatgtttgttctagaaaacaactcttacaaccaaaagggctaactggaggggccccaaagcatggtccacaaagagtcacagacacaataatgatcttgcatgtgcctttatttgtacttgcccctcagctgaggcgaggtgctctgggtgactggactgtgagatgttggtgaatggcttagctggtcagcccattggtgatacacttataaaatagcttattctctctcctgggactgaatgaggaaaaaacatgagatcatatttattgctactgtcacccagggtgtgtcccagatggaagaattggagaaatccatagtgctggcatcttcaaggtagacattccaaaatattgcccttgatctgagctaaaaggtggacatgctgctactcaaagacatagcttggcttctctttgctgactctcaacaaagtaacatttgctttacagtgggtgagccagcctgaagaaggccagctcatgtggctgaaggccgaggatctggggagctgtttgaccatgtgatttttgtgttggaagcagaagcgttaacacatcaactctgaatgactctctccctggtcccagctcccacagctgctgtttaatgaatcacatcctattctaattcagcagaacataatcagagtttaaaggtaggatcttagccttgaacatatgggcttgcctctagggcagtggttctcaaccttcctaatgctaaacccctttcatagagctcctcatgttgtgggtagccccaaccataaacttcacttcaaaacttcattttctactgttgtgaattgtgatttaaatatctacattttctgacagtcttgggagaccctgtgaaagggccactcaacctcccaagtggttcttgtcccacaggtgagaaccactgctctagggcaactctggggaatgaaggctggattcctgacttctcacctatcataatccagagtggagcgtgtcaagaaggccaggcagagacaagggccagcagacccaagaggtcctctccgccaggcttttctgttccagaaacaaatgagagaccaatgggaagtgacagtgaacagaaaaaaaaagtactatggagctagtgaagagacctgtggaaaaaacatggtgaattgactaatagttttctttaaattatgtttgacagagttttgagcagaaaaattaggcaatttgctgttgccatttttcagctcagttttttgctgttatcactaccagtttatttttatagtagaaagcatgcacaaaatgtccgtctcagttaaggcatcctggagaaaatgagtttggtccctatttgtacctgcctgatcctagttatcttgcaatgtcgcaatgaagatttttctcagttttgcccaaagtcccagaagaaggaggtcctgagacaaaaactggagtgcagaggtctactcataggaggactgcaggagctgagcctggtggggcatgcctagaatctcaggacttgggtactaaaaagggagatctcaagcactatgtcagcctctacatagtgtgttgcagcctgcctgaccacatggtgagacagtttaaacacacaagcaaagacagtagatagcctcgggaagagtggtagagttgtagatggggacaagagtgagggaagagaggaagagaggaaggaactatccactaagtttctactgtgggcaccttgcgggcaatactgtgtggagggctccatgagacgtgtttcagaagggtacagaaagtggggtattggcatgaactctgttaccatgggttgggtgcacttctaaaatggacattaactctcttgcagttggctccctttacagatagggaaacctgcctctggtgacaggagagacacaggtgctgatggatggaaggtggcctttgttctgacataaaaagggcactgatgatggcatagaagccctgcattccggtctcatcatgaaaagccagttctccaccgagaccacttatgttgttgtctgcctggcccggggcaagtgttgctgacctctgctttagggtccctcctgtgtgatgtgcttactctctagtaaggttgaaatttagggagaagatttatccaaaaaagtggcaacattcttgatcttgttaaaatcctatccccagcaggtcatctgtagattggattaaatgggttaaatttgtgtggcatcagtcagatcccaacaaaaatcataactgtctgctgaaaaacaccctgggctccggacagagctgctttaatctgaatgctgacccacatactggctgtctaaggcccatgggcattttcagtccttttaaggatctagaacctagtgtcacctcccaggcttggagtgtcaaagtccatgctggtatcttccatcagagctcactgagcactgtgcaagttctccagaagagagcatgcggctgtgcctccacgggctccgtatcactacacaacatgggtcattctccagctgtgttggaggtttctggaaggcaagtctatttctcatgggtctttgtacttaccaggtacagcctttggtgtttggcatggtcagtacatttttgttcaactgacagatccagaaaagataaaagcatgacaactcaagatctcacttagatgcctgtaactcgggttcatctgtgatgctgtctccttgatcatctccccaaacgtcaacttgtgtccaaggagacaaggctggacagagatgcttagtgctgcagctgatgcccatgagatgggaagagcagatgccagtgaagcaatgaataagaactagagaggagatgggaagtgtggaacattccagcagcttgaagggacagcacttcactcttgaacttgagcagatgtcaatagacactactgatatggcaaggctatgttgctaagtgagtaaagaaacgatgggcatgttactgggtactgagtttggaaggatacttggagttgccgggtacacctttttcactttcagaggatatggaggttcacagatgtacagtgacatgttcacagttatgcaatggttggtggctggccacagaaaggctgtcacttaggaagatgctgcagtgttgccaagcatccttttctaaggttcacaacgagtttccatctcttaaatatgaatacaacatactacatggtcattgtagaggtcattgttctttgaatgcaagttacacaggtgcatccctagaccacacactcagagtgcctcctcaagtttgagtatgtcatgaatagtcccaaagattgtagactgggtatggcagggcaggggtgttatagaagtttgttctacaccccttccttcttttatcctttggttgcttatattctagaatattttctcagtgaccatctgcctgccctatcacccagacgggtactgatgtatacagcaacttattcatcataccatatgggcatactctttgtgagagctggatgacttaacagtcaaaactagaattggcaccataaatcagggcaggacaaaaccgtgggcccaagcaatgagtgttcagaagtaggggggcttcctggtgactgaagatggtagagaaaagaacaacgagaataccaggcttggaagcttatgctggcacagagagggaagtaggtttaggctccatcttaccatagccatgagagtaggaagagcgaaacctacaattttgggtaaatacttcaggctgttggtgtttaggatcctggaccagacatgaagttggaaaggaggcccatcctttcccattcatgtaccccaatgggcagaatcagactgtgaattaagttgaaaatgtagcatcatagtccagtgctacctcaggtaaagcattaattaaatcagaactataaaccacagcacccagttcctcaaaggcttcgcgtagaaagtcattctcagcaggcacagtgacggggttagaaacttcatgaagatttatgagaactgtaaaacctgctacaactattaaatgagaaaatataaagcctccgagtgagtggcaggggagaatgctgaaatgataaatctgccgaatggtcaagtcaacatcatattggaagacaaattgaaaacatctgcctgaaaaggtgtggctgcagactgcctgtgacaagctcttggttaaagcagtagagaagtcacaaatcactacatttgatgtttctgtcatgttgcaaattctaatgacccagaaaggttaatttaccatagaaaaaagtgtatggactggtaacaacaacaaaaggctgtgcatgtaatatacacaaaataagaataaagccatacaaacacacccaaaaaacaatgatttaaggagcaatctactgtaaacatttctaaatagacagcccctgggttgaatggcagattcctcactgcggttgccattagaacaaagcttctcaggttctcctgtctctccatgctgagatagcaatccaaggtgtgaagggaagttgctttgtaaagatgcgctctctcctcagcatgacaggaaagcttttcccaagagaggcttggaagggaaaacaagctagctttcactcatctggtctggactagttacctccagtggctactagttagttccccggttgttgtaataaaataccccgacaaaagcaattcaagggagaaagggcctatttgggtttactcagcgtgcgtgacactttctgtgttggaaggaaaggcacaccagaggagcaagaggctatgaggttcacactgaacccccagaaagagaaccggaaatggagctagactataacacccaagagctgacctcagtgttcggcttccttcagcgaggctccacctcctaaaggttctgcaatctttccaagccacaccactggctggggagcaattgttcaagaagcatgagcctgtaaggacctcccgccttgaggccaccacagccacccccatccccatccaccccctgccctccgtggctgttcgctgtcctacatgacatgctctctgcccacagttttcagaccctgactttagttcgcagacctcagggagacgcagcagcagcagcagcagcaggatgttgctgctttcttttccttgagaaaatatccaatcgacaagtgttcctactgaggaaggggaaaccagagggcaggtgttacaatagacagagtaaatacccagtaatagtaattactgaataagcaaatgtgtagttcaatataacagttctacaagcccagaatcaataaactcacataaaaataaattaaagggtcatgatgaatagataaaataagtcatcagtcatgcttttattatgaactcatattgtatggtttggacataaccccagtttttcagtaactgaaaacataaatctttttttttttcagctcaaaagcaacagagtcttgagaaaaatatgcaatttcataagaaacccccaatatatagagtcatgctcaattcagtaaggcacagcactacagaaatattctatttcagaatttatcaagtggcactcatgaaaggttcaggcattattctgacccgcccctgttacctggcagaatccactcaggcagtgccctggtcaggccagggttccatgggaaataggtctgcacgcaggtgcaaagggccccttcaaaagacagaccccgcccacttacaccctctctactctctcttctcttacactctctctgtacctctctcctctctctcttactctctgccctgctctgttcttccatttctcactctcccatcgtaataaactcagtgatcaatatactctttatgctctccatggttcatgttccatagagcgtgcctttaatttaagcagaaatctaacatttggggccgtaagactctgcagatttccccagcatgttttcctgcctgtggcagtcttgagatgtgctaggaccctgtgaacttcaatcaggtcgcttttctaactaagcatctctgaaccccactcatctgcctgttcactgcaatccagtaagacaacccttctggttgggtgcatttcccatgggtcaggtccagcaccctgctcccggagcggtgcattttggtgttaagccctcatttctgtttcagacccctgggtcctcttcggactgctgagtccccatcagatcagactcacgtttcttttgggcatggctctggcaccactcccaggctgaccagcttccagagagaggattttgccatttttgtttgcctcacccatgggaaatgcatacaggatctttctggttgaggccaacagacgggtaaaaaaaaaaaatggcttatggcggctgccatcttggccatgtggtctgacttgggagcctccatcttggctatgtggcctagccctgggccaccatcttggccacatgaccgagctgtaggcatgtccactccagttgtttgtgttacacaccccagctgtcagatcctttttgctttttatttttttgtctctgatttcttctttcactggccctgttgctcatggtttgtttacagaatactgtgcgtttccagggccccctgtttaagtctaggctgtctcattaaatctcccgatgtgtctgcttgtctctttactgtgatttgaatttaactttataattagctaactctatatgcaacttaaattaaactgtgctgtctcatatttctaaattgctgtgtatctttaaaagatgatgaaagtttaaaatcataaagatctatttcaaattaacaaaatatttataccactcagtccatcctgtaagccgtttacaaaggtacagctctttattacaaaacgggatttttctctaactaaaggcaaacttttgactgctgagatactaaaaacagagagacagccctcaaaagctcagagatctagagaacatggcatttaaaatgttttattaaaaaggtttttataacagagagacaggccagctgctggccccaccccatttcctccaaggagactggtgggtactgaagaaatttcatcttgagtcagtccaatgctagtcactgagcaaccctgcccttcacctcaacttctataaagtattccagaccgtggacaagaggacagtggaatcgactttccccacgttgcttgggtcaacggtaggcaagtcttcctatagttcccaattcacaggtcccatgctatcagcaagaaggcaggtgtcctccaagaagacagaggttgtgcagcccacaaccatggatgggggactttgggggaggctgtccatgcagcctactagcaagtctctctgttattctttaaccattaactcaagtaaaatcttatccttctcaagaactctgatgcttttgatgactggtagtcttgccagcctaaagcaaaacagatttcaggaacaggcattttatgttccagatttctagattaagatgcttttcattgtcctaaaaaatatcttcaattttaaaatgttaatgctttcagccaagttgcttctaacatgaatatactgctaatgtgtctaatacttatgtttccacaaactctaaggattcttgtaagttccagggagctgaattggatccaaacaaacagattcactccaaataaatattattcaacctttccctgatcccaggattcccttccctcatcttgggatccctcaggaaggaatccctcccccatcttacaatcctcccctcaaataccaggacccaagaaaactttttttctaaacttaaccttgtcctctactctgccaacattttgttttgttttgttttgtttttgttttttgagacagggtttctttgtgtagctttggggcctatcctggcactcactctagagaccaggctggcctcgaactcacagagatctgcctgcctctgcctcccgagtgctgggattaaaggcgtacaccaccaacacccggcttactctgccaacatcttgcccagtctaaagagatgccaaaattccatatagcctggactgcgataaaacaaccagctactccaggatgtggcagcaccccaaccttctcaggtcccccacacacacaaagatgattgatgccccccgcccaggtcagcaggaagcagccttgagaattctccatccctgcctccctaacctgccatgcccaattccccacctttctatgacaaacaagagccaggatcgttaggacgtacacctggctgaccccgccccctaatgatgggtgggcacacacagggaacgtgctacatcatcaccatatcacccaccacgcattacggccttcgtgaggactctgcacatgcatgaaacctcagtgtgcatgcacggtcttccctttaaaaggtccagctccccaccccgcctcctcttgggttggctaacaatccaaccccatgtccccgcctcttgtcaataaagctccacgtgggttgttcattcatagtttcctatttctttaccaatagctgcagcagaatcgtaacaactaagtaagggcctgctcctgaatttacttattaaatatttaatatcaacatataggccttgaaatatcaccaaatagcaggtttgggaagaaagtaccagatagaaaagatgagaataggagcgcgcatgtgtgtgtgtgtgtgtgtgtgtgtgtgtgtgtgtgtgtgtgtgtgtgtgtgtaatcctgcctatttgtgattatggtattacaaagttcagaagttccatttccggggaggcaaagttatcctcattttatattaataaccatagataacaaacatccccatgcttcgaaggaagtctaacaggctgaaggaagaccgtggggctaggggtagatacaatccaaatacattgcatacatgtgttaacatttcaaagaatacattttaaattattttttaaaaagaaagactaacagacaaagtatttcctgaatgtcacagacaaacaaggagaaaaaccaggcccataaagcatagcctggctggtcagcactcttcttcctatcttacctcggtatgttcttgttgctcccactctgggcaattcacccaagcatcattcttgctttttgttgttgttgttttgattttttagcatgatacattcatccctcttccaggaacgttgtgagttataatacaatttagaaatctgcccatcacatataaaggaacattcatgagccacaaggtggagtaggaatagtatatagcctggagtgggtatgttaaatgggggagcaggttatgacttagattttaggtgtacctcagagccctatattaaaagctgggtttctagcttcaggtccttactggatgatggtggaacctatgaaatgggatcttaagatgttgaacccttctctctctttgctccctggctaccctaaggtaagcagctagtgcattccctacctgatgctctgcctcaccaaaagcagtggagccaaatgaccacatacagaaacccctgaaaccctgagccaaagtaaccctctcctccctgtaagctgatcacctcggggagtttgttaaagccctggcaagcagaccagaacatgactttatggagtccatctttcttgaagacagcctttgaaatttaaactagtgtagaggaaaaccactttccagtgagaaatgcttgtgggccaggaccacctacaaagccttgctccatgatttgggtgcaaggaatgaatatgaacagggtaacatgttagctctggagaattgccaaggactggtgtggtcccttagttaatgtgactagagccctagctttgttcttctgcttcatcaaaacaatttgtgagtggggcttatacagccaggctcttgggctcaagtccttcccaagttgggcaggccagctacactggactccgtcaaatgccaccagagctgctgttttaagatgtcttccagtggacataccgtgacaaagtataagagctcctgatgaatcaattaagtagttggaaagaatctgtttccatgggtatcttttttggttcaccataggtttggaaacatactccttttcctctaaagtgggactccactgtaaaaatatgaactgctacaatccaggcattgtttcaatccaggcattgtttttagtgtttctctgacagtcaccatccaccagactctgagtcagagctcactttgtcaccatcctttgccttccagaagacagcagacacatcatgggcagctatgacctcactgtgtatacatacagcccagaggttaactaaacagcctcagccttgaaggtaaccacagcaaaaaaacaagagaccatctgcatatgcacacatggcattattcttttaaaagccctcagaatatttccataatcactttcttgacagaaactaatcactaaccaattttttgtgactgagttgcccacactttagcaccctgacataagtgagccagctgttttgtttgcccttgctaagtgtctgactggctccctatgaaaggacagcagtgtgcctggagtttgctggcctctgcctcactcttcagttgtccatgagaaatggggatctgcagtctttgagatttaaaagaacattctcttgaaactctccatctttcctaaaatccattcacagactctgcctcagatcttaaccccctttggctctgatcaatcattccccttgctgttaggaaggcaaacagtcctggtcttagctggaagaagctcagctcgcccaggctatcacagatataaaaggtgaagagcataaaagtctggcccgtcagccaggggcccatgagtcttgctccggctctataatgaactccctggtctttctggtgagttgttttgctgtgttgttaggagattcatctacaaatgagattttcttgcccctagacatttcagctgctcaacagctaggtaactgtataggagaaaatgactcagcatgtcttcatttctgaatgagtgagctaagactccacatagattcgtgaatcttcagccaacatcaagccctgcctaagcaacacttcccttttctatgcaagcatgcctatgatggtgtgtagtttacaaattgggtagactaagtcactagtcacaacacaaaccataatggcattaaacaatcataataatatattatagcctaagttatgtgaacatggtctctgtacggactgttggtaactgaaactgtagaaggaaaagtggaccattgtattaactctctgcccactgattttgttgaaggttatgttgaatttgctgttttcatttacattgcgtttttgtatggattttcatcacacaatggcactgagggtaaaggatccatgcctgtgatttcccagactccttttagacactgtccaccacttccatatttggaaagctctggcctattgatggttctggtgatttatttttattgccatcttccagtttttcctgtggtcttctttaaaaatatttattcaatatttttgctctcatttagttttggatgcctgattttttttaatatttgtaacttcacactgccatcaatggagtgaagaaaatctcacttcactggattgtgatgcttgttttagcacacagtaggtccttatacttgatcagccttatgagagagagattgctccttactgtgaatgctcacagcatcctatttttgtctcttccatcactcttactttgcctatgagactgaaagcttttccacagcctgggggaaatggccctctgaagccccgttatttccatcacagcatgggctgttaattcatactttgccctctgcccttcctatgagcaagctgcacttctacatgtccaactgactgtgactctgtcatccaacacctggccatggggaggagggactgcatctagactgcacatgtgtgactttctatcacagtaaatcattttatgtcacgccaccacaaccacgccatgcttacatctcagatggatgtgatcctatcgcttctccacaccctccaagtcacacccccacccccgtcccccacctccccaaacccttatccctgttgcccaggaatcagagacagcttgactatatcaaaattcaccctctctcttagatccttcagaagccccaccccacccccactctgccttctacaactaaactctcatcagagccccagcatgctgctgtctttttggtgtaaaaaactcttctaaccaatctcttaccaaaaacgtcagacttcatcagtgtcccctttgaactctatagccaagaactttcacctacggtgctgttgtttgaagtagatcttgatgccatatgccaaaatgcacacatgggaagaaggagggccaggcagagagagcttatgttcaggctcctgggcggcttctagaaggaaggcccagagcactgagctgcaagtgctgcctatggaacagggttgcccaggccgggtggtcctgagtgggtccttgtgagaatcatgatgtgctccgcccagctctccccaacacactcggcttaatcgcctctacctaagcctttctgttggaagataataatgacatcccaggtagaatctggcaggaagagctcagtgctaaaactctccctcaaagccatgctgcatctgactattaaaggaggtcctttcagagtcattcaccttcatggttaagcaacacaggtgcagtgacaagctaattcccaagccctggagtgacagtcaggtcaaccattccttatttagtctgtgtgagccacagctagtgaacctctccagagagcccttttcactcgagactgatatactggtcttaatctcatgaggaacatttgtcactctttctggccagaagtactgagagacattaatattagaatcaagatccctcagccttccaaaacattggtatagaatgagattacacaggctcaattcccctcttaagaaacttgcttgatctcctaaatctcaaagaggataatccctagtgggacagctccggtgacagtacactctttctgggtttcagatggatgactgcaaatctgtgtcctggtcagtaaggtcacagagagtgagcccaggctaggtaagcagaacacatccttcacctaacctttctttctggagaagacagcgttttcctgaacagccttgaaaatatctgccaagaatgaaatgatttaggacaactagagtctagcaagtctgtgtttgaatcccaactcttccagactaagactgatgagctgatgaattcttcaatctctctgaggcatggtttctgcctctgtcaaaaagaacaatggctgccggcctttggagggccttgtaaagattagtcatatgtgtttgaagtgtctggcccagggtgagctctcaattcgacatggttattaataggagtagagtaattggggtttatttagaggttcttggatgatatgggcagagatcagtggggatgaggctcaagttcttccctgagtgttctctggggaatggccaggctgaggacaggacccaagactacatgaacgaccaagctgtcccagtgtaggcaggcaccttcctggaattgagaaaggttggtactgcattggatggtaagaataagacgatgtaaagtgatggtttatgttatatagatgggccatggccaggttatgaggtccctactcttctcaatctgacccagccaatctcctggagattctttcccataggtaccatatgggtggtcttagctgcatgcaaggcaacaatgagaagatggaaacctatgtggtcttatatggcttcaccaaaatgtcatggctcttcaagagagaagccaaggggcagctcatatctacacacaccttgagccctggtgtcctctgataaagagtagagagccatgttcggccatctagctttgtttttattaatagaaactttggtcatgttatctgagagaaaaataaaaatgctggcccaagagggtgtgtattttgagatgacataatttatatttagcaactgggattatgccccttgagagacatgaaaggagaggaagcgagattagagttgacatctggcctgggcaaatgtcatctcccaaagtggcatgttcatcacaggcccgcaccagtgccaaggaggagtcagaggaaggcaggacacccagagctcatccagcaccagatgttacccctgctccaggtgttgagagatgatcattccaggcagggctggacctgtgagggaggagggtcaggcaatgacagacgctcacagactgattccatatgcattcaccaataaatgatgttggacaattgataagaaagcagtgagcatgatgtcttcaggcttgacatactttccctctgaaatacaatctagaattcaccaagtttctttaggggctgacatcattgtttgaagaagaactggctgggaaatgtgctaatttggcatgcaattatccactgtctatgcagatgatatgatatgctcttaaataatttgtatattaaaattttattactgctttccagaaattaagtaataaccaccaaaataataatgcttacctgcttattctttgaggtcggtgtctctcatgtattacctcattttattcccacaatattcacataaaatttttgaatatcctttgacattttaatataaacatcattgatgtacagtctttacaataatcttgtgaagatgaaaataacattaagacatttaaaaagtcttatacctcaagaaaaagcactgttagcattttaatgattcatttctattatgtgtcaatgcatattttaagttgtcgtgatcatataggcaaaatgtcacagtgtttactcagctaaaaatccttccataagtatttactatgcaaacagcttgcctatgcaaatttctatgtaaatattccttgaaaactgccaagtattacattgagagatatacctcaagatgtttaatgagttctgaatatttggtgtttcctgattctcagtgttttctgttgaactgctctaatgagcatgtctgtggatatgccatgttctgggaaagggtataggagtttgcttgcacaaatgagaagggatagcctggacatctggtcacctgacctcacccaggcaggcatgtttagcctgtgagagttcctcacctctgagtcgtgacaaagaagcaaaggaagagtgtcaacccagtcaagaaaataaaaccatcagaaaattacatcccaagtttctacgtgaaatcacagccatgtgtgtatagacctttagggctccattgaactaagtaaagaatttaaaacagtgattgtaaagcaggcacaagagaaccactgtaggagtttgtggacacagggtgaagcctagatatctgcacttaggtagatagatagatagatagatgatggatgggtagacagatagatggaaacaatgcaaattgtcctacattgacatcaacttggtggccatttgaaaactgtatcatatacttttcaccagatgaatgccagccaagttctatctgtgacacagcactgagagggtcagtcctgcaagccagggtcataaggtcaggggtgcatgtggcctctgaatggaatcctggtgggtcttctccggaatgaagagctaggagctgaatgacacataaggtcatatggagtcaggtgtagttgtgctccatggcccctgattccacatggagaagacctgttgactctacccttgtgccctgtaggatgtctgccgtttacatccattcacttcagggatatgggaaagggaccgacacttcaattctgctttacaaagaatatattggtgaggtttagctggaggctgtgatcaacagctgggtatggttggagttcagctcagcaacatctcattagtgtgttttggctccacagagtcaattccaaacatggcatggtgaagagttcagtgcatctgccggagaatttgggtcaaccagaagtgggttgtttgggagggttgtgtgagggtcagctttatgctctgggctcaggtcgtctttgcaagatgacatcagttttctgggcttcagttctaatgacttccagatgcagtgggtcccctgtgcaacctagagaatgtagcctccagatgccactgcctaaagagcccacctgggactgactcacttcactggctttcccttcttctagcatcactgttcctcaggaaaacaagtcaggcctgcctttgagactgtgcggacagctggcagagaattcaaaccctagcctgtttgcagctgcagctccccagttagcaggctagcttgagtcctcaggatgactgtcctgctttgccggggggacatgaaagaaagcagatgcaattccctcttgtacagtggggctctgttagtcacttaaaaacattagaaggcagcagagctacaggaaatgcagaggatgctcatcccattcaagagacattgctgtggtgaccggaagtcacccagcaccaatggcttcattctagagtgagcaactgtgttgctggagtttctttccagcctggttacacagcccattagcccccaaataaatacacaaagacttatattaatttataaactgttgactcgtggctagagcttcttactgactagttgtctcttaattattaacccataactactaatctatttatttctacatggccttatcttaccagagaacacctggcatatcctgtcttcccaatctctatatggcatccctcctctcctcagcttctccctggctacctctccccagtcttcttctgttctggtagccccacctatacttcctgcatggctactggccaatcagtgttttattcatcaaccagtaagaggaattatatatatatatatatatatatatatatatatatatatatatattccccatcacaactgagtcgatgctgagaacagccaatgggaaatgggaaagaagggcatgccattgctatgatcaaatctcctggccaaagcaactcaaggaaaaaggtcttattgggctcagagttccaggtgacagtccgtcactacagggaacacaaggcagtacaggcttgaaacagcaggccacgcccacagtcaagagcaggagaggatgcattcatgtgtacttgtgatcagctccttggctctcctcttatatggtgaaaaatcccctgctaagctagtgaattcccacacctagttgagctctattgacaaatgaaggctgctgggggatagagaattgaggtttgtttgtttttttaagagaatatccgctgttgggtttactatattatagtggttggccccacacttaagagaatatgagcagcacaaattgggctcagttaagggatctaggaggagttgggggacagaaagggatacgataaaagtgtactgtatggaattcttaaagaataaaaattttaaatctcaatagaagattaataaatcaaatatgactataaaataaaatgggacacaaatgcaggagagtggtgtgtggagctgggatgggttaaggagtcgggtgatcaaaatgcattgtatgaatgtatggaatcctcaaagaattaataataataacaacagtgtgtgtgtgtgtgtgtgtgtgagagagagagagagagagagtgtgtgtgtgtgtgtgtgtgtgtgtgtgtgtgaatatgtgtgtgtgtgtgtgtgtgtgtgtgtgtgtgaatatgtgtgtggggggagtgtctcagagctttaattgctataaagagacaccatggccacagcaacttttatcaaggaaaacatttgagtgccttctagtttcagagctttcgttcattgtcaccttggcaagaaacacagtggcatgcaggcatgcatgacgctggaggagctgagagttctacatcttgattctcaggcaactgaactaggcatagtttgaccctaggatatctcaaagcccaccttcacagtgacacacttcctccagtgaggccacacctacttcaataaggccacacctcctaataatgccactccctatgagcttatggggccaattacattcaaactaccacaacatatgtgtgtatgcatgtgtgtgtgtgtgcactaaagatccatgcatccatgctctgtaaatagtgcccccataagtgggcatatcttttgacctcacttactgtaatcaagataattcctcacagacatgaccccaggcctgatctagacagatctccactgagactcttgtcaagcgtctgaaagtcatgtcatatttctcatcaagtgactctcaatcacatcatattgacagtttatttgtcacagatggctttccttctttggcagactaaaaaatacctatgatgctacacacccaggatcatttctggcttgatgagagagaggtagaccatgggagccagggagagagaatggtactatgtgtaactgagaagaccttggatgttggcaccaggcaagataaagatgctgagcagaacctttgagacacatcacccccaattcacccccactcaagtagggactttgtttcctgctaggggaaggtacgcagtgccccatgcaaattgtttctatatggatttgaagagtgcatttgcacccagcaccaacagatacaacagcctgcctgctgggacaactgttttcccagcaggggatttcctctgactctttttaaggctcttagacatgccagtttctggctctgccgctctgtacacatgtcacaggcagtgtggttctgtgatggacatttggtgttccaggggccaggcttcaatttaccacccatttctctggttttagagttttctgaggctatctccttcctttctctcactcctcttatccttgccatctctaaattgatcttccttccttccttccttccttccttccttccttccttccttccttccttcctcccttcctcccttccacccttcctcccttccttcctccctttttgacagcatttactttgtagttttggctgcccagaactcactatgtagtccaggctggccttgaactcatgacaatcatccttcctggacctcttgagtgctaagattacatgcctacttcaagcttcttctttaaaccacagccaacactttctgattattttatgccttttattaaatttgttctttgacaatttcaagtatgtatacaatgtgttccaattactctcacagccaccccccctgcctgctagcccccctccttcctacacctctactcacgttcatgtcttgttgttttgtgccgcagtgttttaccctggttctctgtgtgactatgagtttggaattacccgccgaagctttgtgggctcatcagtgggtacacacctgaagataatgattccctttccctcagaatccctcagaaaatagttcaacaagaaagagcagggtcctgtgagcctctcctatatctatgattgattgttggcaggtccagtcttgtaaaggctctatacaggcaacgggagctgattgagatggctatgtccaaggcattgtctttagaattctctatctccctcctgcaccatcatgctaggagatacaactgtgtgcacctacagggatgtttcatttgaaaggctcatcaccttaggtgaagtggacactgtagacacaaaggacaaacatgtacacatacccatgcatatgtgtgtatgtatgcatgaatgtgtacaaacaatatataaatacattaaatatgcctggagtcaacaacatggcacccatgaggtcatgaaacttatctaagggttcctggaggactgcccaacctgtctctactggcctaaagctcactcccaacctgtacaagaacctgtcaccagggcaggttcgggtcagccagctgaactgactagaggtctgtgagtagttcatcttatctgagtccatgcaagtattaactctgaaaacacacaaatggaaactaagaattgagtgggagatccacaggaaaagatatcgcttagacaccaaagggcaaggcatgtaccgcaagtgcctatttaaaaccacacttggccagttccttcagttgaactctgtaagtcaatagagttctttatttttataattcttctttattgtcatcatgggagctgcaatggtatcaaatctcagcttttctttgcttgtttcttcatgaaagcaggaagaaaaatactgtctaacctaccactttaccgtgatcatcagttaaattaaaacatgggtcatagaatagggatcactgggctaggaaccataaaatagattgctgtcttattattcaaaataacagaatatgagtatggaccttgctattatgaatgtgggctaatgagagatagaaaaacataacagaatgagtgtttggttttctttttttgctaatgttcagtgtcctgactaatgctacctcccaatggtctacaccataaggacagtcactgctgccagatggaggctgacagaggatctctctgacctgcacaggtttcacatggctttaggacctgtgagggttcagcttagagcaaggagagccggagtggggatagtctgctgtctacagatattaaatggttaatagaggaaagtaggcatatctatttgtttcacttggaaccaaataagaaagtggtgatcagctgggtagaagttacaggtaggtgcaaattcaacaggatactgttctgatcatcagacttgtgtaccaaaagggcagttcatagagcagccttaccagtggactccctgagtggctttaagtctgtctctcacatgtctagtatggtctgttattttgtcactgtgtgttcctcagcagaaatgtcttaatggactaagtggtactgtgtacatattggagagggagactccacaatgcccaggtaaccagtgtgctttcagcagataagtgttgtctagatatctgtggatggacctcttcatagaaagtgtgacactttatgctctatgtaactccaagtgtctcccagtctgtctccaagcagaatcagcacaagaaacaggctgaatggcccccagtccgactcatttgaaactggtttcaaactcaacatcctctacaattgagcttcattaactacaactccagtttaattggaacatagcggccaattaagagccaagaatccatagaattgactgctctttaaacataggttagctcagcaagctaagagttcttttacggtgattccatactgggcagacattaaattgtatctcaaataacagaacaaacagacagtgtgtgggtctctgagtatttattgtgatgatgctatatgagtaataagtaatatttgaggacgttagtcatgactggctttgagtacttcctaaacagtcagccttggaactgagataaacaggccctgggatgccttcctttctctggcatgtgctcatacaaagggctatgggagaattattgcctccctagatgtttgagctgctcatttacatatatttgctgcttttgttgcccagaaatctggagtgtttttcaggtctgaaattcagtgtggctcctaggaggtcttagaagcagatggcacatttgctcaaatatctggcatcgtgatgagacagcttacttttccaggcaaagacataaaggtctttacaggttatggtcccaaaacaattggcacctggtttggaaagagaggtaaagggagttgtgtgctctccctctttgtttaggagatggagaaatagctcagtggttaaaagcactgactcctctctcagaggacccaggttcaattcccagcaccacatggtagctcagagctatctgtaactccagttgcagaggatctgacactcttctaacccctgtaggtaccaggcatacatgtagtgcacagacatacatgcaagcaaagcactcatacatgtgtaaaaaaatcaattttctatttttaaaaatgggaagaaataacacaggagaaaactgtaaagcaaagaaaaccattcatacacataaaataaaaactaattagaaaaaatttttgcacatggcaggaagatcttagaaagactgttcagatgagaggggacctaacataatcactccttttctgcaaagttctagggtgactcagtgaaggtaaaataaacaggtgaagaaattcaggtaaaagatgaaagccctgtaaggaaaagatggcagtagaagaaagggcaaactccagatataaacccaaggtagacataacatgattgattattccattgctcgtgtgacatgaggttgatcctaatgttgacattaatcatggggttgcatgcaggatgaccctagtaaccgggacataaggacagagaatgaggataggttttcaaagggatgccttttgtactggactcactgtgtttaaggttcatatgtggctcttcatagtttagttcaagttaatagatagtagtaccccttagaaatgtgggtctgaagcataagccatatgtcacagctgggattttgatttgggagccgtttaagtcacgtgttgcaatgggctgtccccagtttcacagaaagcgtctaaacatctctaccaaatataaaaatatgagctactcaagttcttggagataggggcatcatgttgtccttctctgtgttttagaaatgaactaaagtccccaaatgatcttctggttagcagatgaggagcgtcctcaaatgcccaagtcctaatcgccagtatctgtgaaactatgtcctcaccttaagagagttagcagctgtggttgagttgagggccgtaagaggggccataaaggacgatctgactccacccaactatggtgatgggaggatgctcgaagtgatacaagtcctcacaggctcctgtgttgcatgcttggagagtttatggaaaccttaggaactgaagcttagctgcaggaactagacaatcaaggggaacattcttgaaggacacattgtttgtcttcctcactgctgggacaagacacctgagcaaagcaccttaggtaaggaaggcttgatgtggactctcttaaagggaacagcacgaggtgtctggtcactttcatccatgctcagtagacagagcgaccaatgcggtgctccccttgccttctccttctcatgaagttctgctccccagcccacagtaaggtgtctccttcctttagaatatgctttcccacctcaatgagcccagtccatgaactctcctgaatacctcctgagatctgtctctgaggtgactctggatcctgtcaagttgacaatattcatcatcacagtggatatgttaaccctggattcttccaggttagctttctgggcagggatgtaggaacaaactctcttccatcatagcctcccaccaccatggtatccttccctgttacataggactagaaacatctaaataggattgtcatgtcttaaatagcatgtcacccaagccttgtacgtttccacaataggatatatgccatttgcctcattgctagtgttttttctttacttctctttcttcctgttatagactgagactcagttttcctcacgttaaaacttgaacatgtgtaacatagggttaaaggtgacccatgagccatatctgatcacatgaggccaagagtggctatgaattcatctcaatgcaaaattaaatgtacctaaaatattatgagcttttaaaaaatataactcagttgtatggttcttggatacaaactttgtagatgaaatgcaggtgtcaagacagcaaaatagatagaagcataggggcatgaggaagacttcgtaaaaaaaatataaagcagcagttgaagtgaaggatttcccaaggccctgacccgaatggttgtctttaagcatagcagagctctgctagaaaagcttgccatgagttcagattccactgtggcattgacgtctttccagtaaaacagctcatgggttttcaagccatccaaaggtaattgaaaacagcagaaccatgcattactgcttagtgaatcaccaggctcttattaaagtaagtttgtcacacatctggtcagtatttagacacaatgaggtttgcatttacgtttctgtaggcttgagataatagtttacatatagacaccagtaggaggtcagatttgtttattcctggaaaaatcaaccaagttgaagtatcagagagacacagagcaaatcttatgcttcatttattggctgagggcagccccactttagaccaaagcttaggggtacactcatgtggcttaatcccaagagacagccatcccgctgcgatttattgcccattccaaaccgggctctgcggctatgtgcttgaatgtttcccaaatggtgaattcagcttcttcttggacccaagcttacaatcagcagaccttcaaagtccagacccctgaagacccctgtagggattttttgacaactatctaaggttagtgcttctttgcctgtaacaaaaagcagatcccctgcttcaccaaagtggatcttcagaggagatccacttgtgcattaagaactaaagtgcctctgatttgtcactgagatgaacccctgatgagcaatcttgagtctgacctagataccccaataaagacacaaacaagatatgaggaaagctaatattgttgaactgttctgttgttaccctacaacacagagatggaaccttgctgccctgtggacgcacagtgaggacctaggtctcctcagtgatcctgcatttgggctgagaccacagaaatccagaggggatgactttggggccagagattgggctttcactgccttttctgaatgcagcctctccctccttgctctcgctgccactgtgcaggtgcttcagtgtttccagttcttactccaatttgctaacctgcaactctgaggagaagatgggcataaaagtagtatcagtctactgaattattgcaaaaaaataaatacttaatgttctgtagatgaatctagctccactagtagctggaatacagtaagatttaataaatacattttttttcctttctgggcatcactgtgtgtaggaacatgaactctggcattagaaagctctggttaaattccagctatctcaagtcacctgtgactttatgcacagtgcttaatttgatatcatccttctcacctataaaatagggataagaatcaactattccaacagagtgacgtaaaggtccaataaatttctacatgcagcatacttagacagcattgagattatagcatagcaaacactgtgatgcttagcttttatcattgttattgccctccttactgacatgagtcatatatgtagtttcatggagctagtagaatgttattatctgtagaagatattaaataacttctctctgagtgagatggatggatgagcagatggctttatggattatgggtgggtggataatgggcagatgatggatggatgacagctagctggctaagatagatgaggatgtatcaatgggtagatgatggctggttggctggctagtcagatagatgatggatagatagatgggtggttggatggtgagaggatgggtggtcaatgaagtaatctttctttggatattggaggcacttcatgatccattttggtgaaactgccattcagataagagatgcccatacgtggtcttttgtatgtcacaaacggtaagtttcagagacactacacagcacagatgaatctgctttgtgacatgcagggcagttctagaaacataagctatctttgtatcttgcatcctggtggctcatttagaaaaccaagacaatgaagcccagcaaaagcaagggatactggaaggtagtcacttgaaaacacactgagtgttttgtttgtttgtttgtttgtttgtttgtatgtgacaggtgtggatttggtcagttgaaagtgtcttggtctgacatccttcttagtcttggaggcaatatgaactaatggaaggagctacttccatgggccagtgtgacaccgggaagtacactagaattctgtagtagtttcagttctttacctgtatatttgaatatcagtttaagacttcccagaaacaatcttgtcttttccatgcagaggtcagacatgagtggcccacactctgccttcattgcttttaatggaatatgccacaaatgttatcaattggaagaattttgtataaagcttaatttcttatttgagacttaagaagtttgttatggcagcaatgtgtagctacatgcccaggataggaaaagggctttccggggtggcctggtccccatcttttcccattcgtctaccatactggcctgagtcacactggctcacctgcctgacctatataggtgcatgcactggcaatgaaggatgaagttttggtggataatgttaggtaaaaaaatcaaaatacacttcttcctggctggtctactcaagaactgtgtgtggaggagtgcacatctgcttggggcgagggtatcgtgtcaagctcaggtatcgctctcagatgctatccacttattgtgaaacagagtctctccctgggacatggggcttgcagattagactaggatggttggctaatgagcatcaaagatgctccaccttcctgggctgggttgcaaatatacacacaaagccaggtgttggtggcgcatgcctttagttccagcactccggaggccgaggcaggtggatctctgtgagttctagaccagcctggtctacaagagctagttccaggacagcctctaaaagccacagagaaaccctgtctcggggaaaaaaaaagcaaatatacacacaatttctgatttttttaaatatgggtgctgaggatcaaagtctgctctttgtgtatgagaatatttatcttgtggtaaaatgtttctttctactagctccatgagagatttcggagcaacaaggatggggaaatgaagatgtggctgtgtagatttgacagtatacatgttctaactcccataggggctttgacttcagcaccagatccttaagaatagaggatggggaggagaatgagaatgacccaaggaaccagcagcagagacacagtgggtaggctgggtcttgtgaagaacggcaatttggcagattgcttcatctccctcctccctggggcctccatgagtcttatttataactcagctctcagagccccttcacattaaatcagtgactgaaaagcctgcagggcggagagatagaagcagcgttccagacatctggactggagtgcttcataaggcaatgaaatgagccctgggaagggggttgggctgtctggattccttgctctggctctagatctgccactgttaggttacgtctccccctttgtaagttgtgaggagaaggtgtttgtgtcagtctaccatgaagaggcagctaagaacccctccgtatcagaaagctgatacggagatagacatgtcatagatagtataagagacttacacatgtttctcttatttgacaagcgatcttctgtgaggatccatagtgacagaataaagctacaggctgatgagcaagcctcagggctcatccctgcaccatctttataaaagccaggtatgtgtgctagggaagaaccttattgtttgatatttccagatggtacaccaagacatgtgagtctaaaatgcaaccaatgcagacttgaagacaattttgcaatgcaaacactattccattccatgatagccattgtctggaagaagctaggcacaatgaaagagtccatcagaaatatacccacccaaaggaggatgaacggtagcttttggtattgggctaggtaaaaacgtataatattcaaagtttaaaatttgtattgtgtgtgtgtgtgtgtgtgtgtgtgtgtgtgtgtgtgtgtgtgtgtgtgtgtgtgtgtaagaagtcctttctcttcttctaccaggtgtcctggggaagcaaaccaggtcatggtcaattcatttacccactgagcgatcttactggccctgttcatagtgtgaaagtgaaacaatctagattatgaatgacctcaaagacccatgtgttaaaggcttgaccccctccaaagtggttttatgaagggtggggatgtagaagcttgaagaggcagaaccctatggtaggtccttagatagctgagcccatgccattgacaggggtcatgggactgtaggttccctcttgcctctctggctcatgaggatgagtgggttttctacaccatatgtccctgctgtgatgtgctgttttgtcacaggccaaagtaatatgaccacctaatcactgaacactgtgagtcaacaataaatgctttatctttatgagttgtttctttcaggtattttgttacagtaacagaaaaatgactaatatcaaaagaaactctccagcagcaagataaaaatggcgggatttgaagccatttatatgtgaattgacatacaccttagaaaagggaaagtgtcaggtaacacgagacagtcttcaaacacgacatgtcacatggaaatttacaaccaatccagaagttagagcagtactgttttttcttatctattcgccccccatcatctaaaatagcaattaagaatacaagctcaaaggtacatacttgattttaaattctaacattatcattaacaagctagataacccttgtcaatgtgtatacatccttttaataataataataataataactaataataataactaaaaacaaaagaatttttgtttaactaaaaacaaattcttttgtttttagttattattctaaacaaatgaggccaaaaatattaattgaagaaattgcttggggaattcactgaatcaatgtcaggaatgttatttatgtaggatatgttcatagtgcagtagctatttttctgtaatgggtccttactatgtgctggattctataccatgagtgggattacagtgcatagtcgctactcaaggacattccaacctatcagtggtcagaaatccctaacattcattagccctgacattggaacctctacagtcgaagaggatcgggttttcctttgacagctgttctggtgggaaggcttatacttacttgtggggatggtgcagaacagactccagctttagaaaactcccaaggttggatgatctttaagtcccctggagatcaaagagtccctaattctaaagtacctcctgagatagcaatgaataattatatcctaatgcatagccacagaatagggtagggacatggaggtcaggtcaagcccttagtgaatgtgcaaagaaaggtcagacaatgcagtggttacttggtcttatctgtcattttggttcctgtgtctcaaatgaatgacgttcctgtcaaacatcggcaagccataattcctctcaccttgatgagtataggaagatctgcaagatccttggaattctgttgaccctgtctccatatcgcatacccgccactcactgaaattttgtttactctgaaattataaggagcataccatagtgtttagatatctgatgcacctattccctgagtcctcctgtaacaaaagttcatttagaaaagagtgtctggatgtcagtgtatgtccccatcacatgccactgcctggcttgtaggtttgcccctggtttgtgactcagacttagaggctgtgatgaccaccatgacatgagcttcagatgcccaaggaaactctatgaagattcttttcagctcatcaccagaaaataccctaagtacacacctgacatgtaatttcagattatgtggaaaagaatagttctcttgctttttgttagctctttaggtgcaacttgaccagccaagtttggttgatatcccttaggaggtctgcccttttctgaagggaaatggaggacaggaggatcactggggtgaaggtagttgggggaggggctaggaggaaagacaggcagggaaagtgcattgagatggaatgtgtgagagaaaaataaatacacttttcaaagggatacaaatggagacaagcatttattaatttgggggagatactttagaatatatttgtttttcctgattatagcttcttctccctctcctccccccatttctatctcccctctcctcccatctggatctggatccattctctacccatctctcatgagaaaagcacaggcttgtaatccataataacaagtcataacaaaacaaaaacgagataaaacaaaaaccattgcatcaaagctggacaaggcaaaccaatagaaggaaaagagcacaaaagaaggcacaagaatcagagaccactcattcacacatgggacctcctgaaactgagaagcttctgtaaggcaaaggacacagtcaacaagacaaaatgacagcccgtggattgggaaaagatattcaccaaccccacatctgatagagggctgatctccaaaatttacaaagaactcaagaagctagtctccaaaacaccaaataatccaattaaaaagtggggtacagaactaaatagacaattctcaatagaggaggctaaaatggctgaaagacacttgagaaagcgcttagcatccttagccatcagggaaatgcaaatcaaacaactctgagatgccatcttacacctgtcagaatggctaaaatcaaaaacaccaatgacagtttatgctggagaggatgtggagaaaggggagcacttctccactgctggtgggagtgccaactcgtacagccactttggaaatcagtatggagactcctcaagaaaatggaaatgagtctacccaagatccagcaattccactcttaggcatatacccaaaagaagtgcattcatacaacaaggacatctgttcaaccatgttcatagcagcattatttgtaatagccagaacctggaagcagcctagatgcccctcaattgaagaatggatagagaaaatgtggtacatttacacaatggagtactactcagcgggggaaaaaaaacaatggaatattgaaatttgcaggcaaatggatggaactagaagaaaccattctaagcgaggtaacccagtaacaaaaaagacaaacatggtatgtactcactcatatgtggattttacacatagagtaaaggattaccagcctacaatccacactgtcagagaagctaataaacaaggaggaccctaagagaaacaaacatggtcccctggagaagcagaaagggacaagatctcctgagcaaattgggagcatgggggagggtagagggagctaggagaatgagaaggggagaagaggaggggtgagaaagacatgacggggcagggaggttgagttgggagaagaacagaagagagcaagataagagataatataatagagggagacattataggtttacagagaaatcaggcactagagaaatgtctggagagctacaaagatgacacaaactaacaatctaagcaacagaggagaggctaccttaaatgccctctcctgataatgagattgatgactgacttatatgctacccaatagacctcatccagcagctggtggaagtagaagcagacacccacagctaaaccttgaactgaactgaaatccagttgcagagaaggaggattgatgagcaaaggtgtccataccaggctggtgaaacccacagaaacagctgacctgaacaagggagagctcctggtccccagactgatagctgtgaaaccagcatgggactgatccacccctgaatgtgggtgtcagtgaggagtccttggaaatctatgggacctcttgtagtggatcagtacttatccctagcataggaatggactttgggagcccatcccacatggagggatactccctgagcctagacacaagggggttctcctaggccctatcccaaaggatatggcagactctgaagaccacccctatggaaggcctcaccctccctgggaggcagaaagggtatggaataggtagggtgttagttgggggggagggatggggaggagtggagggagagggacctgggattgacatgtaaattaattttctttctaattaaagaaaaaaaaaagtcccataaaaatactaaactaaaagctctaatatatctgcagaggtcctaatgccgacccatataagccctatgcttgatgcttcaatctctgagtttcatgtgattttggagggctgttttcctagtgtcctgtatcccatcttgcttttttatactctttttaaatcctcttctacagggttccctgagctctgaggggagagatttggtggagacatcttatttagggttgtgtgttctaacatctttcaatttctgtgtaatgtctgactgtgggtctctgtgtttgcttccatctgctgcaggaggaaacctctctgatgatggttgaaaaaggtaccaacttatgaatatagcagagtatcattaggaataaatctttatttctttggaatcccagttgtattttgttacaccctaggtctctgggctatctagtctctagttcttggttgcccaagcagtgtcaggtataggttttcatctcatggagtgggccttaagtcaaatcagacattggttggttacttccacaacctttgtgccactattgccctaacatatcttttcaggaagcacagcattacagatcaaaggacttgtcactgggttggtgtttacaattttttaggcctgcagagtgccttcctgtacccaaaacagtagaacataggagtgaagtttctacataggtaccagctcaatctctccatgctcaatgaattgtgtgggtgttgtctgcagcaatggggccttgctatcattatgtggaaaacaacctattgttttggttatagcctgggttgtttcagaatttccatgggacctttttgggcagaacctcaattagatatagcccagtcctggtaccagaagctttgttcagtgacaagaggtggctctgtctctaccattaattagagacttcattagactcatcttcatatattttagaaggtttctaataaactagatttttattctaatctaattctaatctaattctaatctaatctaattctaattttattctaatctaattttattctaatctaattctaatctaattctaatcaaattccccctaattctagttgactttccccatgttcttttgatatgattattatttttaaacatatttttaaaaaaatatatgtagatgtgtgtgggagaagggatgtttgttgatgagagaacttgcctgcagaagctagaagagaattgatcttatggaattgagttgtagatggttgtgagctatcccatgtggttggtgggatccaaacttggatcctctccaagaatagtacatttctttaagcattgagccatctctccagtccctataatttgaatttaaataattgtaattggcttaattttgtacacaatagccacagaatatcctcagcattgttgtgccatgagagacaaacccataacaccttatcacccacattcaactgactcaaacagcttagcatttatttcaatactgccttccagtggtcattaagctttgtgaatgccatttacaaccatggaactagaaaagaaaacatagcttgaaagtagaaatatctcatgagactcatttcttccttattgagcctggtgttaggatacaggaattatacacattgtattactcagtgtgatctttaccacaggaagtaaaatagccatgagtctatcacttctagagaatgaaaccaaagcttagagaagataaatatcttggccaataattctgaatctaagaccaaaatctaattctgtcccgcacgatagtcttgccggcaagaaccacacaggacatttggatccttctgcagtaaagctttaatgcgtcttgagaggagagcataagcttaccagagcggagaccccgagccaagaatcccgtcccctaataaaggctggcaaccaccgcctcggacgtgttaccccatgattggctgcagctcatcggaccatatgacgccacgggagaggcagagaccaaggaatggaaagttacccagcgcctgcgcaataatgtttacattcggtgcctgccggatgcaggtgccatcttgtaatggcgaatgcagggacggctccctacataattctgcaaagcatttgttacgctgtctccagtccatgttggggtttcttatcaggggtcttatgtggaggactacatcacacatttttcatacaccattggaggacaattattcagttgcactgcatagaagcctatgctgggctgctcctctggtttattgactaagttacaatagacatcaagagccctagtgatttcaatggaaatggtagatggaaaaacaattgtaaacatttatgtttacaaaatctttatttaagggttgtcctaagttagataagtggaaaatatcttacccaaatgggatctctgtgtagcttttggtattcaaatgttgagctcctgatgtcacatgctggaatgtgtttggagtcaggatgaaggcggtggtagtgacggggtgcatttgcagcttgtctttaccaagtcagtgtggattctattattacctttttagagaaaaatgataaatgaaaaactaaaatgagacttcagacttctctggactgtagtccatttgcaaggcagcagccacatggccatgttcgaagctgtggaacatagaaagagatgatcagggggaaacaaaaggagaaaatcttcttacaaagaaaagattttaaacagccaagagaaatgaaaagaaaggctgagaagcaggaaaatagcaaaggctagtggtgccattggtcctcgtccacgaggacaaaatgtgagcctgggaatctaatctcgctgcaaagttctgcacctccagtagagttagcatgttccatccagacatgagaaattgtgagtaaaactaaacctttgagcccggtgttataggaagctctagtttctctcttgtgagctataagatgcctgggaagaaagtctccagttaacaatgtggtagggtctgaccttggaaaagcaaaaaccccacatatgtgcagcaatttttaccaataaaagaagctctaatgaaggattgaagtcgccgaacaagcaaaaataattgaatgttttattcagttgagaaacatttattgaggatacactaggtctcaggtcatatgccaggcatggaggttgtactgctgaatggtccataggttttgtgttctagggttccttcatagtgaggaaggaccatcagtaagtgagcagtcaccatgcgaagtgatagctcttggagcccaaggttctcacatacaacagcagtgtttgcaacttcaagggtatgaggtttacaaagtgtagctggcacttggtgggcactctagaagtaggtgatttttctctgtaaggaggcactcactggcactgtgttaggacatctctggcaatctcctccagattccactagagccattgtcgatgtttatcctgtcatctgacacaatctaaattctgcagccaccatgggagatgttagccatcaccaggcatgtgtcctttacccccagatgacccccactcccactggtcacctcactgaatttactgacccctccctagacatcgccttccatcactttccttcctacaccattatttgagtcctactttctcttcgactgtcctcttacataggtaacccagggcagtatgattcatccagttgtaccagtgtctactgagtgttaatgggtgacctggccaggtaggaaaatatcatcaaagcagagcatccgggcaataaaatgtcaagctcaatgccaagctatgtctccctctctgggttacctccttgaacagctagtgaagaagcaatgtcatgggatatttgggttccatggtcatgttcaaataggatatttggggctgctttctgtgctaactatctacagagaggaagctaggaaatgctgctgttgtctttccagaggcagccagatagcagccggaaagatggcactgccagccacagcccacggctgtcttccttaggagacaatttccttaattctaggagtctgggcttttgaaattgtggggttcacagaaacgttttggattcatcttagaaaggtgatcgcagtgattttgcctcagttgaagcagaggacaaggaaatgattagctcccttcccaactggctggaaccaggttggaggttggattttctctctccagcatcagagtattgtgtgtactcacctagccctgtctctctcatgtgagtgtatatgtgtgtgcaagtttttaaatatgctgtctgtcctagaaggggctctgggtggcagagcatcagaagacctagtctcttaagtcacattctcttaccagtcatctccatctcttgactgtcagttacctgtagtcccatccacaaagatgtcaaataagtagttcacatcctaggtcaatatatatatatatatatatatatattatatatatatttacatatataatttatataaaatcactaagatatatataacatatatatatattagatataaatatatctatggttgaaaaaggaaataaggtaagagacttaaagtcaaagcctatgactatgattattaaaactcatcctaatgtatcatctctctaaagtacaggagttcttgctgccctgccccctacctctgagacaggatagccttggcctttacaggtaacagagtggcctcttgataaaattgtaacctctaggctgctccctgacagaacactgagacaagcagtctcagccagacaaacgctaaggaaaataatgctgtgcagaaggacaggtagagagaggagaacacgcagagcactccagttgtggctaatgagagactgtgacgtgaacatgacagatgtcagtcttaggatgggggtgactctctcttgagcccagccccacatttggtgatgtctgactttcttttgagttcctcttttcctcttaaccctcacgcctaagcccatattaaaataacatcaacagaatctctaactactcatagggaagaaagggccgggagagggagaggatgggcaagtggagaaaacaaggagagacgtgtgtgggtgtctagagttcggaaaggcaggtgagattctcacaatgtgaaagatggggtggataggacagtctgaagaccagaacaaataacgaaataaagttcctgcagggcaaggctgcttgcagtctgggcatctatctgctgcacagagctgcagactccagtcactgggaccaacgccaagggagagctggtcacctgactcagagtctcttcatcaatctgaaggctgttacttcccctctgatctgagtgggcatgcggctagcatctctgtgtcagccacagctgtgttaaggaggtcaagggaatgtgtggaaaagggcaattgtctagggagaggagtagcgactcccaggcagcattttttttcttcccccaaacttccctgggaactatcctattgtgtcactgtcactttctgctggtcatctacagcccttctgaaagttcagttgctaaatctatgagactccccccaagacagaaccccaacacccctcaggggtgtgtgagcacactgaagagcctcgttcatggccatgaacttggcacagcctcaggccagcaccattccagtaccatgtgatatcggcagggttactcacttggttgccctccagcagggcagctggggacacctccctagagtgactacaacattcatcagtgagatgagtcagcccaagcttccttctgcctgaaaaggaaatctgaggctgggctaggggtaagaaatgcccactagacccatctctggccaggagaggctagaactgcccctcacctgggaagcacacagtgtgggctgagtaaagttcaggtcagcgtctcagaaacagagaatgcaccatgcactttttccagaggtgtgactggcaggtagggctgtgcttacagaagcccagggatgtctctactcagtcacctaatgataatagcatctcagctgcccgcccattccatctcgctgatttcactctcatatttcttctgtctttctcacttctaggggctgtgcattatgcattcctaatatgtttctgggagcttttgtccctcactgtctgtctcaaagaagcaattcagctaggagactccagcagaagcttatttggcaaagcaagctatatactacagagagattggggtgcactgtcctgaaaagcgggccattacagttgggagaatcctataacctagtcgtaggataggtgctgtctggtttcctgcctgaggatgaatccgttttccttgcacaggttaatttgtgcaatctgtaatgctacatctacagttccttcatattcctgtcaattatgagtgacagtatcatttctctaatagaatcatacacttccttccaaagcacctgttctactgacagttctcatgcccatgacctcctacactgtgttaaccacatggcaggtgcttgcccaatgcttgttccctggtggttccagccttcagttcccaagggagagaggtttggcacactttactgacagttactacaagcaaagtttgaatctgctaaggaagggccctgaaagaaagcctgggctttcttcaacacctccatgtttacaaataacacctgcagtttaattggtggatttccagatgccagcctgcttgttaactcagaggaggtgcctggtaccactacaatcgctcctacaggtgcccaatacagtcatttggattgcacttgcactctccaagtgattgctcagatatttttgacttacacttctcagttctcttcactttgagaagtgttattgacttggcaaacacaagaagaagatctgggacctctgaatatgggtgacaattatatggcttgatctgttgtaggggggctggcagtggaaccaggacctatccctggtgcatgaactggctttttggagcccattccctatgtgggataccttgctcagccttgatacagggggagggcatggtcctgccttaccttggtatgccagactttgttgactccacaaggaaagccttaccctgtttgaggtgtggatgggtggtgggcagcaggggaagtggtggggtgggagaaggggagggagggggaactggggttggtttgtaaaatgaaaactatttttgttttgaataaaaaaggaagatctgaagcctccatgtgtttgcagtgtgttctgggctctccatgctcctgggcaggtcttctctcaaaggtactgtcaccaacatgttcttaaacccagtctgccttctcctctctgctcttcaagaacccaaggctccagccaggctccatcatgactgtctctggctttccagtgtttctatatcactctcaatcttagtgacttttctgttactgtgctaaatccccaggactggaagtgacttgaggaagggtttatttggcttaaggttccagaagcgagttgttcataatggtaggagagacaagcaaaaagctggctgctcacatttcaaccacacacataaagcaaagacagagacagtagaacaggctataaatcctcaaagcccaccttcagcaaggctgcatatcccaaagatcccaggacctccccaaaacaccacctcctactgtgtgtgaaccagaccaagcattcaaacacatgagcctgtggggaacgtctcattcagaggcctctgcgtgttatctgacactgcctcccgcccctagagctgaatgagcaaccataatgtaatgagatgaccctgggagtgctagggagtgattcatttcatccgggagttgagggtgggcgagacagagtcagagggttgcatggagagagcagtgctttcagccatgtcctgataggtaggaggaatggcagcagtgttaggaagggcgaaaagcgcctgagagatgggagttctcagagcccagtgagcttgttggccatgatgatgactattgatgagcagacactaagttgtgatgcgatttacacttatcaatttttgagcaaaaacaaagcaactccttttacagaacatgaacagagaaatctgccctagggctaaagaaatagctgttgttaaagggcttgtctggcaggcaagaggatctgatttcacgccccagtgtccatattaaaaaacaaaatcaaacaaacaaacaaaaaacaagatgtggcaacacgtgcttataatgccagagctgtggaggcagagacaggtagcgtcctgaggctcactgaccagccagtctagcctacttggtgagtgccaatgcagcgagagagactctgcctcaaaataaagatagaaaggacctgaagaacaccaccaaaggctgtgctctggtctctgtgtgcaaacaaatgcatgtgcacctgaacatatacacccccccccacacacacccacagtaaaatgaacaaaaccaaacctttcttgtgtcatgcttcccaagggctgtcctctacaggctactctgaactgtactgcccagcaattccagtggccctatgtgtccgtgcatatttaaagttaaattaaataaaacgttttttccttgcttacactaaactcctttcaatggcttaggggccatgtgtggtccctcctttcccctgtacggcagcatgtaaaagctggtgcaattgtggatgggacagtgaggtgtgagtccctctgggtgtgttccttttcacagcttccttaatgggttggcagaatgctcttccctggtcacattctaactcaaaggtgccaatgttgacaaactggctagaatcctagacccctgttgagatgatttataccacaatccagccttgctgctcaggagcagccaggctctggctggtcatgcaccatctctctgctggaattgtctcctctatcaaatggaggtggtggtgcagtcattctcatcaacttgactatgctgagaaaataatcatttaaaactcaggttgggactggggagatggctcaaccaatgaggcacttgcaggcagacacaaggttggagtctaggtcccggcacccactgtaaaggcaggcaggcaggcaggcaggcaggcaggcaggcaggcaagcatgacagctcacctgtcatccctgctcaacataaaaggtggtgagtgatgatggaagatgccaaatgtctacctgtggcctccatacacagtgtacatatgtgtgcacacaaatatgtgaatacacaaatagccatgcataccacacacatttacacatgcaaaaaggttaagaataatattggttcatattttcttcttctgttctcttttgtacagaggctatctttaaaaactattttccacataggtgttttctgaattaaaaagtgatgtgcttagcaacctttcaactctcagcgtgaaggcagtatgcatttggaagaaatgatatttaggacataaaattttagtcatttccttggttagtgagacacaaagcatactcccatgatgctgagcagtggcagctgtagtgagtcacgaggaaggtcccagccacccacatggccaagagatgcaggggactccatggtggactctgctgctatgtcagggtgtagggcaggtgaggtggttcagtatgctttctgcttagatgggatgaagctgtgttaagccagggaccacctgcaatcataacatgacatacagttgctacaaatgaatattataagccatggaataaagatgttaatgcaaaaccccttaggacactatttgcttgagaaggagctttgctatgagtctggacttgaaaaagtagtttccaactttggtttgtatattagattcttctaggattcttcatcctcatgtcctgcctatgccctagaccaagtaaaacaataccaatggtggggatagaatccacatattggcatgctttttttcttcatacatttaagattccttttcatgtaatatattctcatcatggcttcccttcccctgactcctcccaggtcttttccgtcctcacccatgcatctccacacccctttttctctctctagaaagcaaatcatcagttatgtttccactcatgattccagtgtgcaaagcccagtagagaaatactggtctagaagggctttaatttatttttaattgtgtgtgtgtgtgtgtgtgtgtgtgtgtgtgtgtgtgtgtgtgtgtgtgtgtgtgcatatgtgatgcctgcaagggccagaggcttcagattcctagagagacacagctgcttgtgagccacctgatgtgggttctgagaccagaactgggatcctctgcaagagcagcaagcactcttaattgctagacccaccgaattagtgaacactagatttaagtggagaccctgtctcaaaacataaggtggagagagattggggaagacaccctaacctctgcatgaacacccgtacccctgccccagacacatgcaggtatttggtcacagcaatgagaaaactaactaacccaaattccatccccagaaatacacacacacacacacacacacacacacacacacacacacacacacacgtgcgtgcgcgcgccactagaaccatacatccggagagagattttactatttgtcttgtcattctctggaaattatgctgctgagcagaggtcccaagtttaggtcaaatgtcaaccatcaatgataaggtggttgtgaataatgagtgagatggaacttctccccaaagatatatttcttcagtgcttttatggcaaataattggataaatgcctattcttttattgaactgccccagatttatgaatccctttgtttcctccatttgaaaatatttattctttgttttatggtgtgtgtgtgtgtgtgtgtgtgtgtgtgtgtgtgtgtgtgtgtgtgtgtgtgtgcgtgttggcttttttcttgagacagaatctcaccatgtagcccagtgtagcctgcaactcacaatgtagctcaagtaggcctcagatttttgaccccctttgttagcctcccaaacatggagaagacagggaagacgggaacatttggccacagcattttgcctttgtcatttgtttcatttggggtattgtaaaataggggctttggtatttcctgactttttttttaatttaagaagccaaggttaaggaagagtctaggggccatggctccattctcacttactctgctgtggagccctctacctcaaacaccgctgctggccgctcctcggctgttgccttcatctcatcagtatgctctcctgtagaggccaaatcctagactccactcgcctcatcttccgcgtgctccaagtcgcaagccttgcctgacggttgacttgtttgccgctttcactaccccgtcccccactgtgaacatcttcagtggacctggaccacattgatttttggctcctagttgacaatactagttaggtttgttaaataacccttagttcatttttaatccctgcctgggattaaatatgcttgggcatatgaagataaataggaactcatggaacatataccatcggtccttgttccctaaacactctacaagtcccctcatactcctagctgccctgagtttacgatagagtcatgtgactgattctgggtcctgagcatgtgtgtaaggggagtcctgtatgttatttcctgtctgatgtggtaaaggaggactgtgagctccattcattcatctgccagctcctctctctctgctatggttgctatggaaagactctgagatgacaaagctcctgagtgacagcaactcaaatctgtctgactgacctgtggcaggtgtaatgaagtacactttggggaaaggtaggtggagagttgttgcctcagccaaacctagcctgccttgactactatggcatgtgattctaacgagaagagaggctttgacatagataatgccatttgctcatgagtccttttcagccctttacaacaagtcagggttggtgtcatggattttatgacctccagttattttctgcgagagaaaagctattatcattttattgatgaagcaaaaacattgtttttccaggacgacagatgatattagtgtgagcacataggccccggcttcatctaagccactgccgatcattctacctggatacaaattgtccctcccccaacagtaatgtcccccagggcttgtactctaggaataagattgacctatttagaaatgggacagactttgcatctctacacctaactccactgaagaaatatctgtgtggaagtaacatggcggtaaaaaggttaaagctgaatttgagatttatttctaggcagacatcctgagccccccggggaaagattgcagctgccctgtggcccagataatgcaatgtcagggtgaacaaggacagcacagaacattctgttctcctcccctgagaccaattaaaatctgtaggcatctctcttgttgaccaggctgactggctaattgaaaagaaattgggatattttcatgtgtcttttctgagccctgtgtggaagaagttttgtgatcacaacactcaagagtgtgggcctagtggacgtatccacaaccactctgtatgcgccattgcactctaaacaggactcaagaacgaagtgacacatgtgggggaaatctcagtcctggttaattcagctggttaatttcagctaaggaaaatagcaggcgtcttcagggtgcacgatgaacaaaaccctgccagttagcagctactgttccctgcaggtcatgtctccaccattgccttcctccccagcaaaccttctgctccttgaaaaactgctggtgttcaagagctaaggacctgctgagatcccacaagatcgagttcttccagctgacactcatcttctcctagacgttcaaatagcctacttaatccccacactcaggaggctaagacggcaggatcatgtgtttgaggctagcctcagctacatagctggatcctgttttaaaatataaagggagtaaacttaacctcgaggagtttccaaaatagctacagaaacctgccacatagtttaaagtttttggatttatttgttttactttatgtatatgagttttgttttgtgtgtgtgtgtgtttgcctgcatgtatgtatgtgtggcatgtgtgtacccagtgccttctgaagtcagaagaggtctatggatcccccggaactggaatcatgggtggttgtgattcactatgtgggtgatgggatctgaacccagctcctttgtaagagcatcgagtaggcttaactgcagagccacggctccagccacatctgctacaccaatcttagactgttttttctgcccgaatgtcagagtctctgctttacttctggggactttttcttctatattatctgagctgtctcaggcagtaggcattagaaagggccttatttccagctgtgagcaaattctggttgaccaattctccaggagaaaagcatgattacagcatgaggacaaaggtctaaccctcagaactcagttctagattttccagaaggctccatacctggaacaaggacatggttgaggaaagtggttttggctttgcagctgcctctcaccacactgaggacaagggaatgcactgaacagctgtttccctagaacctgttgacaccctggttcccagtgtgataccactagcagaaagccatggcaagctgatcgggccctgggggcagagtcttcagcttgagattcacacccttataaaggagaggcatcagaccacaattaatcatatgtgtcgtatgcttagaacctgcagagctctcagatattttcaataaaaaagcaactaggtgagggggtggaaatctttcttgtttgcttttcttctgggggggatggtttatttcatgttatactgtatagtcaatcatttagagaagcgagggcaggaactccaagcaggagcctggagcagaaatgatgcagaggccatggagccgttctgctcactggctcactccccaagactcagtcagcctgctttttatagaccccaagaccagctgcccatgtctggggaacatttttttaaattaatgattaatgttgaaggatccagcccagtgctacaaaaactcatatgaatatagaaaatagtttaatttataatatgcaaaaccataaaaattctaaatacatgtcaacagatgtatgttgatgtagattggaacacacatacacacacacacacacacacacacacacacacacacacacacacacacacactggaatatttcttagctttaaaaagagagatttaacatcattcatgaacttgaaagaattattctaagtgaatgaaaatacatgagattaaatactctatagtttcatctacatgaaattctgagtgaatgagtgaaacagatgacaggagagaggcatttggtgattgacaggaggatagggattgtattggttacagaggagcacagagaaatatagttggttatttttactctttactctttgggagcctactgcccagctcccaaataaatcacatggagtcttattcttttttatgaatgcccagccaacttttcttaacttaaacaatcccatctaccttttgcctctgggcttttcccttttccctgtttctataaacctttctttacttcttactcttgctcctcgatcccctcttcccagatttctccttctatttattgcctctgcctgccagtcccacctgtcctttctcctgctttgtcattgcctgttcagctctttattagaccaatgtttcagacaggcaaagtaacacagcttcacagagttaagcaaatgcaacgtgcaaggatgcaacacatctttgcatcattacacaaatgttccgcagcataaataaatgtaaaacatcttcaactaatgttctacaacaggaaactattttgagtcgtgattcttcaggtgttaacacaactgtacagttactgatttcattgcttataactgcaagtttgaaataaaacagtatgtacattatatctcaaagccaaatgcatttgaatgtacatatattatttcaagtgaaactattctgtgtggaagagattacatatcacccataactcagtgctctctgtcattggcaggagattgaaaacccttaaggagaaactatgtccaggttctccctgtgcccggtagttcttccccccacttctctgagatcctaagagggggaatggcacactttctaaggagtacaagaggcttccaaaataggtccaaaacagcagcattgttatgattgcacagacctgcagatggtcgtgaacccggtgaccctgggcaaggactctgaaaacatcggtgccagctcaaacagtttatcaaaatatgtttttgttgaaaaatcaggcagccaatctttgggactcttggatggggagggaattgtttggctaaagctccctggggcttctcctgaagtaaaagcacatggacatcccaataaacatgacgcaatagacacagagttcagggtagagggcaggataaggggcgatttcctctgccaggggcctgttgactttgaatctattgatttcaagtcgagagggcacctgatgcctaacactgtgaaagacatagtgagtgatgccaaggaataaacagcagggaacacacacttgtcacatataacatgccttcaagatctgtaccccttaaattactaggaattgataatgtaatatacacaaacaagcaccaaaataaataatgaaaatagattttaagttcccagcttgccaagttggggaaagaacagaattccctgaagaaggcaagtatggaggacaagaaacatgaaagttgaaatcttagagtttagagggaaagcagtaaacagcagaagaggtaaataaatccaaaggttggatcttagaatgaattaaaataactattgctacattatcaaaaatgaagttaataaaaaattagaggattcgcaaaaatataatatgaaataggatatgggaaatagttccagaaacaaaagataataaagggttcctgaaagtccccatgtaatgaatcttaaatgagttttaaatgtttcaaattcattgcatgacttgagcataacattaaaaaatttccaacagtacacatatagtcattcattacgctagactcagaaatcctacagaacagattgacagcaataaaaatagtggtcataaacaaaatgttagcacaagaataaattaatggcatactgaaggaccatatatcatgaccaagtgagatttctttcagaaatttgaactatttcagggtattttcacattataaaacatacaaataaaatttacaattgtagacttagagaaaaattaaatgttagatgttgcaaagatatttgacattcattacttaaagtattgtatctggagtaagtgaattcctgaatgaatgtatgttgttgacatgggcatggccatgtcaaggatcctagtgcatcagcctcatggaaatggcaaagtctttcccaagtgagactctggagggatggcaaagcctccctcaacaggtttacctgttgacggtgtatttataaaatgtctgcagtagctttctccatactgggggaggtttacagtctaaaggctgctcacctatagagacagctcctactgagattagtcaagcctgtctccttgttcatctgtgtataatacccctgcttcttgcttcaactgtatataatataataaacacattgagtttctgtggtactgtggtatctccatcagagagcacagaccacctatctcagcgtttgtgtccatgtgtctgttgtttcatcagtgtctttcatccttagttctctcacttcccctaatcagggttctgggcctcaacctatacaaggacagagcatgaagaaaacccttccattcgtacattcattagaggaaaaatagtatgtgtgcaaaataagcccagtgcccagtgcccagtgcccagtgccatactaaaatggaaaatactagaagtatttcatgtcttgtaggatttaaaaatataatttcagcagtatcatttaatgtaatacattgctagcatatagaatcacatcgaagatgtgtaagaatggaaagatgaaagtaaatgaccactttggcagacgtgactatatatctaaaaagttcaatcaaaccaaatggaaaagatttacattcatgaaagaatttgataaggttgtaaaggacagaattagatgtggaaatcagtggctttcctaggcaaatactaagtaagagcaaggaacagaagactctcaacactagccaaaatgtaaccacagttctgagagtatatataaaagcaatctatgggaggactttgcagagtcaaaccagctcctgaatgacaaaaacaggggctaaacaagtgattacacaaccatgtttttaaggaaacccaccaccaaaaatacatccacccctctagttgaatttaaaatagattgatgaggccatagatagtggccccttacagaaggcccccttcactgctgatggaagcataaattagtaggggcttacaggaggcagctctgatagtggtgtttatcaaaattagaagtaaacacatttattgagtcatggccctaattccacacatgtaacacagtacacgagaaaagtcagtgtgtctctacccagcaaaaccagaaacagctggtgtgtccatcagaggatcagtaaattacagtcaatcccttcatagttgcatgatgcagctggaaatttaaacaaagaaaaatatgaggaagttccacagatagagatgtcttcagggtggtaccagcaagaaaggggagacacagaccactgtagaaggtgatgctggaaatatttatcgtttagaggaacaaatacttgtgttttcttgtatatgctaagaaaatgtctgggcagaggacaaaatgtaaggagacagaaacaaggaggcattttcaccatgaacatcttagcagcttaggctttgaatccatttgagttcataaatttcaaatctcacaatcaatgttttaatagagctcagtaggttcagtaagatataatgaatgtttacattatgaaaaaatggcatttaagtggaagaagagattaaggacataataaaatgtcccaaatcaccaagtgtttttgtgtgttataccctgttaggatcattttacacatgtgtatgtgatagggaaataggaaaatggaggcagagactattcacttacccaaagtcaaaatgaggctgtctccagatgcctatagttttagtgatgtcacctcctgatatcatatgacatacaccacacatacacacacacacacacagccacacacctataaccatgacaaaggcaaactcctgaactttgcaattcatttactagttgtgtgagtttgaaaaagctcttcaaaatgtacacacctagttctctttcatgttagatggttctgattattctctagctgtctctagggctttctaaagagatcacacaggtaacagggaaccaatagagaatctggaatttcagtaagtaccacaggacagaaattccaaagacagcagaatccacattgagaaacaagggtgggcagaagagtggagaagccattcttgctatacaccgattttctccccaagtcttaggcagatgttagtctgcacagagctcgggactctggttataataaattaatacgcatcaaaggaaagaaattatgcatataggcaagaaaaacaatggtaatttttaaagaaaacaacaataattgcatccaagctcaaaacattataaataaagaggaggaggaaggaattccagccacagcacaacatctagaaagagaagccagacctgctgtctgagaaggtggcttctgggaacaagttggtgactctctataaattgatcaccttgagatgttacatgggagctctgctactctgggaggagctggtgtccccaaaaggagacagttctctttgggagaatccaacagagtgacttcaaggtgttgtttgcctttaagatgtatacaacaaacattcctaattctttgtgcaaatgcgaatgtagagtcccaggctcagtggaagtcagacaaggaaggcaaaccagtctacctctcctaccctgcctcagtggaagtcagacaaggaaggcaaaccagtctacctctcctaccctgtcactctgtcctgttcccctagcccagcttctactacaaacccatgatggcttccagaatacagtccaagggttctatacccagaaacacagccctctttgcttattctgtgccagactttttcttttgggttaccaaccacctcccaaatcataacacaaagacttattattagttttgaatgcttggcctagtgtaggctcatttctgggtagctcttttaacttaaattaaccagtttctctttatctatcttttaccttggggctcattacctttctttacttctgtatatcttactttctctgcttctcttgtctgctggctggcgactgcctggtttcttgcccccgagtgtctcccttgttctgcctccttgtttcattgagtctagactctcctcctatttattctctctgcccaccagccccgcctatcctttctctgcttagctattggttgttcacttctttattagaccaatcagattccttaggcaggtacagtaaaacaaatgtaatacatctttacatcattaaacaaatgcagcataaacaaaagtaacacacttttctacagttaaagtaacattctgcatgcagcataagcaaatgtttgcctaggtaaataatatcccacaacattattccaaaccatggaataaactaatggcaatggtaaattctcacagtctaacaggttgtgatgaaagtatttgggattccatgtcctctctctgtctttcctattgtcccaccactcaatccataaaaaaactacttacattttctactcattaattcaacctgttatatgaataccaataaccctttatagtcatgtaaggctcccatggggatcttcccctcgggctcacactacagactggaagaaatggttactcgcattctaaagataaggaaacactggcaaggttaactaatcaatctcagatagatagagaatttgagaaggagctgggtttgctgaggtctttggatctgatagttggagatcctcaaatattaactaacttggtctcaaagtttcctccatattctaacagcctgtggtacctgagatgctgcacccttcaccaggccaggagttctcaaggggagacacacagcattgggcctgactctgataagggcaccttgggttctacttactggcagaggggcacctatcctgggatccaccaggctgtagttacatccccccaccatgtcctggttattatatcactcattgagaaaaactgaaaacaagagatgacgttttttgccccaaactcctcttttgaactctctgaattttggctattttcctctaaaagttactgattcaaaaacctgaccagaagacacattggactaactctgtatccatataagggaaccccatggcagaaaagatagggtgcatgaatccagaatgatcactcaggacctgctcctcagaagtacaaggttcttcgtacaatgaccccaacacacacacacaccctcatatacacatccagctcccagggaaatctagattcagttactcaatggatatttgtagagaaacttctagatgcaaagcattagtgtagatgttgggaatatggggacttaacaagacagccagccatctgccaccctagctaccaccacacttgctgatcttccagaggacccaagtttggttcccagcactcataatcaggtggttcacaaccagctccaggaggcctaacgtcttcttctggtcactgcaacacctgcacgcacatgtatgttcccatagacaaacactcactcacccctaattgacaaaaaaatgtgtatttttaaaaattatattgcctaagacctatagaaacttactgctgatgtagttttaccccagaaccctcaacacaaccagaatttcttccatcatcagttctctctctctctctctctctctctctctctctctctctctctctctctctcacacacacacacacacacacacacacacacacacacacacacacactttgattccaattgggatgggtagttctggcaacacaaaagttgaatgaagcctccacagatctctggtctttgagaggcttctgggagaggagcaggtgcattgtaaacatctggatggtcatgtgagtcctgggacgtccctccaaacccaggatgtaagcattagtttagatactgtccagaaggactgctgagctcctgaaagggcagcaccacagtgaacaaggagtctagcccttgacagccaaggaagttctagtcttggccctcagtcaaaacaggaagaacctggaaagcactctgatgtctgtgtccctttcaggatggcacgagtgtcaaacacgtgaagtcagtttccagagaatcaatgtgttaaaacccatgaacgctactgcatcaaaggcagcacaagaactagaaaggaggctgaagtgagctgccctggacacggctgaattaccagtgctgagttttcaagaccaagtcacctttggaacacaaagcaattacacaaagctccctgtgtaacagctgagggagataaacaaagtaaagaacaggactctcccgagaaaagaaaggtgtccttcgaaggacagcttcctaaaacgcatgtgtttgatggatcgtgggaatgaattacttcacactggcttattaaatttgaatctaacatggtattttcaaataggattgtgttcccagtacagcatcaccgggaaaggcagaacatcatgagtgtgcaaacatacactgcatggattccttgtattaaaatctcatttgactgaaatagctcctttgagagaggtgtgcagaatacctctaggcggccagtgaaccaagacataatgataacacacatattaaatatttctgcttaggtactgtactctgctgtacttcatatgcccagagaacaagaatgtcagtagtttagaagtatctctctctctctctctctctctctctctctctctctctctctgtgtgtgtgtgtgtgtgtgtgtgtgtgtgtgtgtatgtttctgtctgtctgtctgtctgtccctctccctctcacctctatgtccctctctcctgcattctccatctgcttttcatatcaaacaaggactcaaagttcttcaggacatatcgcctcccttcagtgatgccgctacaaaatgctgactcagcattttcatcagccagcctctgagtgagcaatgagacaagactgactactctgccgcccatcttggagttccatcatcacacccctcctttcagcccagctctggtctgggggttttaagtttagggatggctcctttaagatctacatatcttaaaaacagtactacagctccagccccaaatcagatgatgttaggttttttttttttcattttttaattgtcatagtaataggaaaatggttgcccatttatgtttgaataaccacacatagttcatttgaaatgggggtgaatatggggcagaggcatattcagatgattttatgcaatgaaggtgagatttagtatcaaccaaagtattgatcctggatgcttgtagctttgtgatgctcagcttcccattaccataataaatatttttataaagagaaaggttcatatcggctcaggcattgagatggtcccgttcattataattggtcacatgtcattttaggcttgtaataaagcagcatagcatggcaggtataccagttactcttcaagttgtaacaaaatacttaacagaagcaacaaaaggaaggaaggttgtttttggtcatggtttgagggtaaagaccatcagggcagcagaagcacaagacagctggtcattttgcagtccagaagcagagagagatgaatactggtactctagtcactttttttattcaacccatgatatggtcccacccctcacactcacatggcctctcactcccagctgcatgacagggactctggttacttttattgtgtaaagtccattcataattcttctctttttttggtttttcgagacagggtttctctgtgtagctttggaggctgtcctggaactcgctcttgtagacaacgttgatctcaaactcacagagatccgcctgcctctgcctcctgagtgctgggattaaaggtgtgcgccaccacctcctagcccattcacaattcatagtcacatttacactaagaaatattctttaaagaatttgttacctgaaagaattgaaagcaggggctcagacaagtacacacggataatcatgggattattttcaatggtctcaagatgtattagtcacgtttttatcactgtgttaaaactgcacaacccaggcaacttctagaagaaagtttgttttgtcttgtggctccaaagagttagagtccctggtggtagaatgaagtcctggcagcaggagcaggaagctgaggcttcgagtcttgaaccacaagcactgaggacagagagtgaactgggaatggcatgatgttttgaaccctcggagcctgcctcctgtaatacacttcctccagcaaagccacacctcctaaccctaactagtgtcaccatctaggagccaagtgttcaaacatctgagcctatgggacatattcttactcaaaccagcacgttctactctcaggcccctgtaggttcatggctatatcataacgcaaaaatgcatttagtccaactttgaaaagctcccatagccttccagtttcaatgctgtttggaaatttcaagtccaaagtctcttctgagactccaccaatctcttcagtataagcccctggtaaaatcaaaagacaaattacacactgttgacatctaagacagcgcatcccggcagcaggagcatcaagcagcagatcacattttatccccagtcaggtacagacagcactggatgcctgtgtgcagctctttgctccctccatcttgtacagtccagcaatctccctgagggaatggactctactcagagttaagatgagtattccagtatccactaacctaatcaaaataacccctcacagatattctcagaggctaaccttaatctagattatccatcacaggtatgcctagagccctatatcctagatggctctagatcctgttcatatggtaattagtactgatcatcaaagacagataaggaatcattttgaaaaatattatgtgtttgataattgtcttctatactagacaatcacctgtctgtttcaacctatttactgctatagtcctagactcaaatacagtaatcagtccatatcaatatatatttcttgcacacaggatgaatgaatgaatgaatggtatcatcattatcatctcatctttacagtgtaccagatctgcccttgtgacctccaagccccatgcagaaagacaaccccaccatggatgtaatctttatcattcgctcattaatttactcaagttctcacttccacctagaataaatgaccatgaacaaatacccccttgtctttataggtaatcctctgagaagttcaacctactcactggcccctgaaagataggagccagtgagactacagcatcacaatatcagaacatttgtccagttcttgctcattctgtctgaaactgccaaatagatattccatggagagtgctgaggagctccgtgtgattccccatccggtgcagtgtggagcctgagcctgtgacaacccctagatcctacaagtgcccgcttgagccaaaatacctacacatcatcatctgcagcatcaggtctgggtgcctgcaggactaaaaatatttatgcttcctgttccctaacctcctgaaaagctagaacctaaaaagaaggaatatagctctgatcgtgcaacccgagtatccttcgtttatttgaccaagatgtagggcggctactttctctgtctgttttgcctcagcttaaagaatttctgaactttggcctcaaaatgtgaagaaattggtaacaaaaaggcataatctaactaatgcttctagagcaaagccatacaatttgccaaggagtatccaagtttaattatatatcagatagattccacgtttaaatgaatggttgtattttcttttctgttattgctacaaaaatgtctggtgttgcttttcagctaggacattcatttcttagacctaatatgtgatgggcttctgcttccctgttacatatcctctttaaaaaggagccattcagtcagttctcataaaacacaccaactgtcatcagtctctttattaaacatacctgtttaataccctgatagttagggtcccttttctatcctgaatttctataacagggcaagcaacagagaacaggaaattgtcaaactcttaacagagctgggggtgaattttcaaaacctcatcactttaacctgaaaagctagatgttttgctttcacccctccctcaaaacaaagatcaccatcgtcttgtagaataaagccagagaagacaactccatttccaaatcccaagatcttttcctcacccctattactttggatgactcttggaacctatgaccaaaagcaaaccttgctccatctgccatcagcacataacacctgaagaccagaacttgtgaaatttctactatgcaaattatgccagtctatgagagaaaccacacacacaaaggaaaaaaaaaaaaccctaaaatgaggtcactgggtcagtaaagcagtacttgatatagaggcataaaaacacgagtccagatccctaggacttgtgtataaaaagctgggtgtggtgcctttcgatcagtaccccaggctgtggaggcagagacaagcagatccctgggacttgctgaccagactacctgagtcagcaaactccaggccactgagagactctgtccctaaaggcagggaagaaagtacctgactcctgaatttgaggtgatcctttacatgcatgaacacacatgtacatccaaacacacacacacacacacacacacacacacacacacacacacacacacacacaggggcacacacttctatacacacaaatagagtctaaaacaaagtgttttattgcttttgaacaagtagatgacgagaaactctcctggagcctactgatatttcttccagactctctccaatgcagtttacaaagggaatgcagtagaggctcgatagatgattgctgagtgaacgaatagaccctttgtgtctgtccaagagttttaatgagattcttggagacagaaatgcatatcccgctaccaccttcagaatggtccactctgttcctttcacagagagcaaactgaatgtctaagatgtcatggcttataccaagtcttgctattctagaagaccacactggggtctctagcccagcaccccacctgtcactggtaagcttagacaacattgctaaaagcatctgatgcatggcaggctggaagagatgagtgaggaggggagcaattctagcactggcaacacaggtgctcagtgcgaaggcgttcactgatctcagggctagtaaacaaaccaagactacaacccactgtgcccttccagcaggatgcacacctgggggcggctctgtcagagagcagatggctactgtggaaggcagcagctggctggaagaaagtaaattgaggccccctggtgaccagggttacaggaaggagagtgccaaaatactgcagcagggcaaggtgtggggcgggaggagacaggcccacgagttcttctccctcctatagggcagaccctgtaaagatgagtcatttcaggtcttatttaacaactgcatcttgacccctggagaaatgaaagaatacattaccaagcatctcccataagtcaggcttagtgcctagcgcagaggctggttcttatccaagcaggaatcaaaggcagagaaacaagtcccattccactgcatagtacacttactgttaggcaagaactgacccattgacagagaaaaggctcagaggtcaagtccacagattcatttgagtaccagagaagtctgagtgaatggtgaacaggagtaaggaatgcagggaatagcacctgcgagagcccagaagctgtgagggatgaaaggaataccaagctgattccaatcagttagaaatggtgccgccttttctattaggaattgccaagttcaagccctgacatgtcctccttgagtgtctttgaacaagttactcaattattctgatagttggctttacaaatctatcatgtaggggaattctatcatttcattgctaaggactgaacccaaggtcataggcaagtactgctaggcaagtactctactactgaactatacacgaagtcttttctcactcagtggccaaactggccttgaatttgcagtcctcctgcctcagcttccccatacctgggattacaggtgggtaccattatacctggctcgttttaggtcttgcaaggattatatgaaacagtatttttagttgtttttcagacatgtccattctgtggcccaacacacacaaaataataaatttaaaataatatatgtctatgtggtgggggagatgatgtaccagcggaggccaaaagagtcagatccccctggagctggagttacaggaaaggaaaggcagaggccaactcgtctctgacctgaaagcactgtgggaacttcacactctggtcaaagagatggagagagctgcagggtgtcaaaagaggagagcgatccatctagaactgtctttcagtgggctggtctatgagaaacatgatgaagggttggggacagataatgatgttttcctcagtgagactatgcagtagtcactcacagtgatccaggcaggaagtaaagattcaatcggaagaggaagcaaaggaggcagagaggagagatactcacaggaacaaagggtaggacttcactgttcatggcttccacggaacacagaaacaagagcaagccttcaggactgaccttcagactgtttttagttggttacgaatagtatggggtccagatatagcatgtgaaaacctttacagtaggacagtcttactgaatttttcacaaaagtattaatcaatctacactggctttgcctatcttaatttcaaaaccattggtctaccacaaggtatatccagtgggaataaaatctaagccacatatcagaatttgtgccaacagtacactttatttaactttgtacttatatttaacattttatttaataaattatttatatttcatcatgaaatcaatatgaaatagaagctattttgcattcttttcccatcccagtgtgtatttagaaggttatatctaaagttggagtggccgcacatttgaaactcaatagctatgtgtgtctaatgactatcatactgactgggttagatgactgtataggtggtctgtgatttaagagccttaaaagatgaacaacatatgttctccaaaacatacctactctccatccaacctctattcctcccccgaaaaagaagcctgggtaccggtggttagatttagagaaatacactgggcacgttcagcattgctgcttcatatcgtctttagatgccagcctgaccaggcgggcaggaagctatgtgttttctccacagaacacctttcgtgtagtgacaagtaccaggtggcagcaatctcccatcaaggatacaacatgcctgattctgaggatgtagttgggcacctttgacataagttaagtcacaacctttgagttagcctttatcattaacatgggtagaacttgacctcaactctcactgcagccacagaagctgttccttgggtggctgtagaggagagagcccttgcaaaggcacagacctcacaaaataaaacttttgtggtaacaatggctatagcatatcttcaatgtaggcacgtttataagccatacagggctcagcacacggcagcaggccacatggtcattagtaaacaattccaaggtggcaaggatttgaatacaacatgagaagagttttctccttagagtcctgctttagactgcacaaagtacacaagagttgctgtttacaacttcaagagtcaggtaactgtatcccaaagaaccaaggagactctgagattatatgacagattttactcaagaaataagatgttagccacacccttgagaataagtgagtggctagtcttggttttaggcattttttttttaccctgaaactcaagaataaatcatcaccagacaattttgtgttggtttgtgatttgaggacaataaagagagtttctgagccagtctcattaccatcagatgatgtcacaccagttatttagagaatgtggctcttttgtaactaaacatcacatgctcagcttgttcatttctgagttgtctaggtcattctatattattctgaggctcatttatcatcttcatcacacatacacacacaagtgctctccaaattaacatttatgataatgatactcgggcgtccaactgattacttatatttttatttcacattcttgctataaaggtctcacaaaaatgcagtttcattttggatatgttcttaaatgccaaggaaatgtcaaggcactcagtgagtaattgactaaattgtccaaagacattagaagtaatttgaggagaatgaagacggggagtagtttgcacataagaagtaagagggcttccattttgtaaaatgtaccccctgaaaacttgtaagagaagagaaaagactaagaccaaaactctacaatgccaacgtttaacaaaaagacaaagaaatataattttcaaaagaaaaggaaattttacttctgttcctacaatactgcagtttgatcaagagtagcttagggaagaaagggtttgcttggtttacagtttcaggttgaagtacatctttgagagaaagtcaaggcaggcactcaatcacctagtcacaccacacccaaagggaaagaaacaaatgcatgcacgattcctgctgctgctcagctagctttctctattcctatgttgttcaggagctgctgcctaggaaacagtgtcaccacaatgggctggaccaattaataatcaagacgactccccagtctaggttggggcaaattgacatttaaaactatccagcacaatagtgttttagtagatccagctgtaatattttaagaaaatgagatgccaacaatataagtgatacaaatttagtcctttaacacacacctattgagtatttactgtgtggagagactgttccaagcacccggaatttaacagtgagacaaaattgtttccctcatggagtttccaatccatttcaaatttaaacagaccacatccaataaggaaagacaaaaagtcattattcaagtttggccatttggtgaccattgggggcagtgaaataaattcaatgtcacagggacatgaaagcaagcaagggtggtttgtggcatgcacagtaaatgcagtaagaaaaccagacattgtgaagggtttggaggtggattacagagagtgtccagggagactgcagtatagaagaccaatagagacagaattaataccccaaaggcaaccaacagaaccaagttataaacactgcatgggtgtgcgcagcctattatcaggcagtttctactctgacatggtcataaggaggttgacaaatgttggttcagtgaggggtcacaggctctgcagtctgaaatatgcaggacagtccctgagcctttgaatattaagagtccttaggccaagatagtcactcaataagcatgatgacttggatggcagtgtcactaattaagtgaggtgctgtccttgctgtcctacgtctatgcagagattataaccttctaatgatgccaccaagccatgcagaagagacaacatcttccctcccaaaacggatgaagcacagtggagaagaaggtgaaaggagaggggttggcaaatgatggggccaagcatcaaaacaaaaagagtccacaagtccaaagctctcgccaatagaggccaacatcggatgcttttgtttaaccccgtacttaatggcccctgaaagaatgtcttgttatcatgatgtgtcagtctcatccacagccctggagtccaatttcgagaggtgagtttgaaagaaatgttggcactaggttggcaagtcacctgtagccctcagatcgaagccctagctgtgtctgagaagtgagtttgaagtgaatgtttgccttgggtttgcaaactcatgatcacaagctaggacaacttgggccctctataggttgtctgacctgagaactaaggccagttcacctcaaatctgtctctcatgccaaactatcatgaaaagtcctggaaattctttcagaaggaacatctctggtggttcatattgtcaatttgaccagcaggctctagaagcaccaagaagacaggcaggcccctgggcaggtctgagcatttccaggtgatattaagtaagacaggaagacccgcccctctgaaatgtgtgccataccactccttgggctctggtcctgagggtatgtaaataagaaaaaacaagtggagccccaacagtcctctcttcctgcttcctgcttcctgcttcctgcttcctgcttcctggctgcagaagcaacgtggccagctaccactctgccttcccctcaaactgtgagccaaaataagcacttccttcctaggtagcctttgtcagacattttgtcagggcaatgagaaaagtcattgacacaggctctcaatgccttcagatactatgtgtgagtctcaagccaaagaaaatggggcagagatcgagacacactggcaaatcacacaaaacatgaggggatgagtccaggacggtgcccctttcatttgcagacactttctccagcatccagtattaggagtacaagaaggtggtaagacccagccgtgggggtggggagatagttcacttactaaacggtttgccttacaagcttgagagacttgagtttgatccccagcaaccatgtgaagtaagttgccatggtagcatacccttgtaatctcagcaatgaggatgcagagacaggcaaatctctggggatttctggccagccaggatagccaacttgacaggctccaggccaataagagaccctgtcttaaaaatcaaggtggatagcatccaagggaaaacagactaggttgccctctgatgtctgcatccaggaacccggaggctgggtggaacctatgttctgctaagttttgcaggctcacaaaagcagcactgtcaccagcactggacctagcagctgctcctcctacaaggatccagagcttggctttgcttttaaagcttttttttttttttaaaaaaaaaaaagatgcttccatttaagaccaattgtgtccatttatacaagataatgagatcatggcaaagttacgctattgttttagaaactgggaaacttgcaacctgaaaagaaaatgattcaataaaataataacaaaatcattatgtagttttaatatttttattaaataaaatggtggctcttcagagcctattatttctgtgttatttataaagcttctttccaaaggagccctttgtcttcagctccacttgtcagcaaacactgctcgaacataaacatgagccagttgagtttgactctgtcagtggtacccacatgctggcccctttggatgagcagaaataggtgtgagtgccccagcagttctcactggagaatggagatggtctagatgcaagcaggcgctgaggaaggccagttctgcctctctctcaagggccctggaacattctttcactcccagtatacaatgtgagaggaattctctgttacatttggttattgtgcttatgtctctgctctttctggggaatttgcaagagtagggccctggactagagcacacaaaggaatgtgaacccagaggaatgaagtaggatcctagaagtttaaaagaattgcagtaaaatcatccatgccactaagtaacctactgtgtgtgaggcaggtaggccaagagagaagggatcaatgcctgaatgttggaataaatacacaaagagagaagacacacaaggtcacacataatcacctgcagtaatgtctcacacaaaacttcatctcatacaccaccacatcacacacacacacacacacacacacacacacacacacactgattacactggactggggtgcaacctggccagtgatattttcttgctttctttttagacaatagtttcactaattcttttgatgacattcagtccccatcactctcattaaccccatatccaccctccaccattcagctccatcacatcttctggtcctctttttaaaaataatgtaaaataactcaccaccttcagtttgtgctgcccacatagtcatgagtgtggggacagccaatggatatagacctcctaccagggaacacactctgccccagaagagcactgacatttttaacacccctggtgacactactgtggaacaagatttgggaaccactgtgttatggtacaaatgcacttcttgttccatagaaagttctagaagaataaatcacaatgctgttctgtgtcataggggacataattttcgacgaaatgcattgttcttgtattagtaagactcttctaaaagacagaagcaataagatattgttgtttgttgttaacattaacattaccagcaaaggaaaagaatttacaaaactttatttttatttcttgctgtttctctctatatttatatggtttcacacacacacacacacacacacacacacacacacacacacacacacacatatatatatatatatatatatatatatatatatatatacatcaatccatttacctatcatatgcttacatatgtctaaggtttatctacctgtctatgtatatatgtcatctatccatttggttatctattgtatatggttatctactggtctaatctatctttctacttgtctacccgtctatccaccctgctatccaaccatctgaattttgtttctatgtgtacatttctctgtgtgtccatccttccatctgtatgtgtgtctagctcatctgtgtctgtctattgatctatccaccactttctttcttattgttttttgcatttttatatttttataattgtaattagaccaattttaaattagaaacaagcttcttttacatgtgaatcccaggtgattataaggaatttgctcacattataacatactaatgagtccccaaatctgtagttgacaagctaaaagaaaggcaacgatgtagttttaggctataaaggctgtaaaaagaatgatgtcccagttagaaaacagtggggtggggggatttccatattgctccaagaagcttatccattttcttctactcaagctgccaccgactagattagatgaggcctactcagtctatagattcaattgtgaatcacatccagaaatagtgctacacccagacactagacacacccagaataatgtttgacaagacctgccaatcatgatcagtcgaagttcccatattaccttaatcatattatcttcaccatgtgccaggcatggagcagattccacaggctcattacctgtgccaggtacattgttgcatgaaagccaatggaggaattcacatactgttaggtcccagtctcttattctccaaatacaggcaagaagcaaacagcaataagagcaagagctctaggctggaagatagactacaaaccaacaagggctcagagtcatagattactgctctggattcctcttggatatctcgcctcatctcctaagcactggacttacaggcatgtataaccatgtctggccctacggcatgttttggtaggtgcttatgaatccagtacctacaggttggtgttggccatgtacagagacctggctatagtcctttgtgccctagacatttaaaacatcttttgctttggcttgtcctgtgtgctttggctgttggcatctttccaaggagctgaagtaccttccaggaacagtggctcgctattgcccagatgtgcatatttggaggatgaacagaaagagtaggaggcagacccggggtctcaaggctttaagcactttagatagagtatcagctaccccaggtctttgccttgtcagactacagtcatttgctgctgagtcagacagcctgaccctcctaagtgataactagattgatttcattaactcttccacctccccaggggtagatgacagatgtgcttatggttggcacattctacacagcttccttacgtttcctcaataacaaatttttaaaaatcaaataattaatcagttaccgttacaggactactgtgatggtttaaataggtatgacctgtgtagacttgtgtgtatgaatttgtggcccataggcagtggcaccgttaggaggtgtagacttgctggagtaagtgtagctttgttggaggaggtgtgtcactgtggaggtgagctttgagatagcatatgctcatgctccacccagcgtgacacacaggccccttacactgcctgaggatcaagacgcagaactctcagctccttctctagcactgtgtctgcctccatgccaccaagttttctgccatgatgataatggactagattcctgaaactgtaagagagccccaactaaatgttgtcctttgtaagagttgctgtggtcatggtgtctcttcacagcaatagaaacactgagacaactcccaattgctagccacagagccactcgtgactattaatatgccctgacggtgaggatcaacactgtgcccaagatgctgttgcccccagagagtaggcaacagtctagagagtagcatggcaccctattcctgcctaaccagccatgcctaaataattcctcacctttaataataaacaaaagggaaaaaatgttggatcaccgccccaccacacacacacacacacacacacacacacacacacacaggccaccttcagtagcccagcaacagtggccatgtcattaccagccaacaaaacgtgacacatttccactgttgtgacactgaagtattctccctatgcatcataccccattataaaagcctgtgccttctcttcccaccctctttctcccttccacccttcctcagcggctgcctctgtatgcctccccacgcccacccccatccataaacctctctaatgaggcttgttgcatggtgcgactttgtgtcatttcttggctccaatccaccacggtacccttccttctgaagtgagatcctaaaacctaccttgggagccaggacatagggaacccgttgttctttgcctttccttccatttgtcctgatggagattctggccatttcaaggcggaggaccactcactcacccttctcctgtgttcccagcacaaggaagtcacagtgcctggcagagtgagctgggtgaagtagagagactttcatacatgactaagttacctcttaccgaggctcagcagcttgtcctagccaggtcagtgaccaaaatggttccagtataactcagaatctgacacttgggataatctttctgactacatttaggtgcttcgcagtaagagacactctgatgacaaaaggcacgctggctaagtgtggcaagaattccatccccccccaaccccccgcttcagagattacgtacaaattagcaggaactcccaccataggcttgagggtctaccccactgccctcgatgcccccttttcagccttcctgtcaatccagggcccttccggacaccaagcccattctgctgcccacttgccagcccccccaccccccacaaagggctgcaggcctgttggcttccatagcaagctctcagctaggctcagtttctttgtaaatagcactctgaagacaaagtattcccagcaagcttcaggtttaggttttcattccttcctctaaatttgtgttctatttgaatctcagcccagagggcaggacttgtaccaaagagcaggcccaaacaagaccagcctcttgtctgctttttcatgggaatcattgttaatgccattccctgctagggtccttggatttgggccacctcacaattcctgctgggggtgacaagggtcagaaaatactcaaagaactactttgtctctctcccaaatctgcacctccattgtctcccagaggtgtcctttagccctattagtccaccttacccacacctggacaggctgctcagaccccagctgtgaaattcttttctgaatataattttttgttgttttgaagtcaatttcctttagcaattgccagctacagaatgcaccctgtcccttcagtgtgctgtgagaacagcgaaacttcttcagcaccttctggtagagtttattcaagaaataaagactacacgacaaattaaaaatggggcatcagaaagactggcaggaaaaggcctcttctaccttcagacattcccacagccccttaaaagcaaactcatataatagctaaaatatatgtcttattttaaaaaaaggttttaagtcatgtgtaggggtatgtgaacatgagtcccagacctgcggaagcaaatcagtttgttgggttccctggaactggagttgtgagctgaccaacatgatacttgtgagctggctctccaatctcctcaaaaatattttctaactttcttcctgtgcctccataattgttgccatcagctgctgctacaccatgtccacaaatctgtgtctcatggacaagagcttcaacttttggtcccagtaactaaaagccagaggtagttcacaccaagaagtaaaaaatgtatgttgacccacagcttggagatttcagttggtcactggttggccccactatttggagctactggcaagaaaggatgtcacatggggtacatggtggagcaaaaccaacttaaatcacaagccagagaagcaaatggggaaagaagaagagccaaggtcaccaccattctttcactggcattcttccaatgacctgactccctcccacttcttaaggtttccacagtcttgcaatacctccctgggaaccaagcctttactgcataatcctttggggaaacattagacatccaagcaacagcaagaagacagcaaaaatgcatccaacttctgttgtctttggttcactcctcaatatccccttgtgccacaaggttgggtgagaaatcaaaaccttccctctgtattttggaagttgcatagaatcatcatgctggacaattttggcatctccgagcagggccacacccggagttaaatagtatctttagcatccttgagcacaggaccaaaagcctgtcctccaacgagtggcccagttctaagcaacattcttagtgctgatcctcttgataaaaacaagaatggtttagttatagaggcaatactgctctcaactttcctactatggggagacactcccaaagggaaagccagaggtttagtagtagagcctggccaagctcctctcctgaactactgccatctaccaagagtcaaggatccaataattatagaacaaggatcctgagaacagaaggagtaagagtttctgttctttgtgtgggccaaggtgatactttcaagagtaaatggccctcgagggcttccctggcttccctgctcagcggtcctggtatccagacaacagcatcattcatcacagagtctcccattaccatgctcaagttccatgctccaggcaccatgataagcactttccgatggatgtgctgttctgcaaagcactcacaattacagggtgggttattattaatgtactattaaccccatttcacacatgagcaaattcataaatgaagaaatttgtagcatgagacaaggctcacttaagttgggaatatcaaagccctgtgtgtctatgaaatgcatgcaccacatcttctgaggtgaaaaatgacatagccaaagacacagtatgacagggatgaggagatccagatagtgtatgagagggaaagagctaaaatgttcaggaggctgtgggagagctaagcgaagattctgggaatctgtgtgggagcatggaaaccacgggtctcctccagactggtgagaacagtcatctccaatcccaagggtcccctcccacccagagccagcaccccatgtatggggagttccaggaaacactgaggggagggagtggtagtacatggaggtgggacagaagtagagatccctccccacacataaactctgctcatcttaacaccatgggtgatacgtgatggcactcagaaaaggcctctgattcttttagaagttaccagtgttttatggtcatattttaatgattttacatggaatgtttatgttttgttgtgctgtatttgttcttgtgctagggatacaattgggagccttgcccatgctaattaagggctgtcttactgagccacagcctaggtatttaagcaatttttgttgatatattaccataatgacagtaacctcaagagcctgagtaatcacagcatctttaattctatgtgaattattgtaatctctacacaaaaagccaaggatttagaagtattcatgttcttcagcactatggaataacaggagcaccctaagacatctgatatatcaatgtgtgtgagtatgttgtacttgtgtgtgcatgtgcatgttgtgtgtgtgtgtgcctgtgcatatgtgtacatggatgtgcatgtgtgtgtttatgtgtatgtgtgtgtttatgtgtatgtgtgtatatgtatgtgtatgtatgtgtgtgcgtgtgtgttcatatatgtatagttatgagtgtgcagcagcaatcaatttggaagctagcatcttagaactgggagccatggaatccagcttggataaattcgctcaacctggggtgatgcattaaactgttagacgaaaacgtatctgggtgccacttctgaatagtgtcttcaatagggtcaaacaacagaatcaaaaattgagtaggaaatgacacagagtgactctgtgaaatgaaacttcataatagaacagaatcaaggaaaatgagactcatttgctttatgttctcaacaaaattgaagtaattaagtacaaaggtagcatgggaagaaattaggtcaaaataggtagatacagttatgggctattattgcctccctggaattatttctcatattctcattatactgaactttttgctcctcagactctccctcctcctcagcctctcctcctcctcaacctctccctcctccccagcttctccctcctccccagcttctccgttctccccagcttctccctcctccccagcttctccctcctccccagcttctcccttctcttatccacctttctcatgaagcttcctaattattttcttggcttccacctatgccaatccatcccctttccccagacttttttcttcctccttccacagagacctggcatcctgaatcacttcatctggcaaggccacccctggctctgccacagcctggtgtgcgtccaggttacttaatctctctgagcctcacctatctcctcttctggagtgggtaaaataatgtctgcaggctgtgatggcgcgtagagaattactcctaagctccctgcctccctccatgcaccccattcccccaagtagagcctggatatcagtcatcaccctagagcagtggctctgtgagtcttgaccctttaacaaacctctatctccaaaaacatttacattacgattcataacatttcagttatgaagtagcaactaaataattctatggttgtgggtcactacagcaagaggaaatgtgttaaaggtcacagcactgggaaggcagaggactaccagcctaggactctcttgccagttctagtcttgggcagcccttattctacttcccagctctaggaatgtgaccatcctgcatagctcagacaagtcaatcatacagcatttctttttgtaactggctcgcaacacttaacgtagcattcacaaggtttgcgcatgatgtagcttgtgcttgaatctcattcttttcttccagatgggaaaatagtttgattgtgtgcactcagtctactgcatcttactcatctactcctgcctaatgggtgctcagcctgcacccacttctggactgctgctcatgatactgctgggaacgtccgtgcacaaagagctctgagcatctacccaggcatggaagtgctgggccaattcaatcttcactattttaaagagttctcatactattttctatagacatgtcagtgtgtattgtgaacacacacacacacacacacacacacacacacacacactttcatctttgcacatcaccacagcacttttattttctagtttttgttaagcagcaatcattctaatggctataaggaaatttttcattctaattttgacttgcaatttcctaacaatttgtgacatgatcttattaggcagttgttgatagctacaatacttgtgctttgatcttgattataccttacaccatcacttcaaaaaacatgtattttaaaacagcctttaaaacatccttgctcaaacgtccttgtagtcagacgtttctctcccaactccagttcccacctaactgactcagagacttataattaattacaaatgctgagtctacagctcaggcttattaccgcagaactcttacatctaaaccaacccatatttcttatctatgctttgccacatggctcatggcttgttacctcattttctaaagccctgcttcctccgtagctggctggcatctctcctgactatgcccttcctcatcccggtatccccagttcgattgtcccacctaactttatcctgccctactataggccaatcagcttctttattaaccagtgaagtaatacatattcacagtgtacagaaggggtattccacagcacttcctctcaatttctatcgttttagtcaattctttctcttttgtggtgtgtgtgtgtgtgtgtgtgtgtgtgtgtgtgtgtgtgtcagagagagagagagagagaggggggacttgcatgtgtgcagaaccatggaggagggggtgcaggtgtagttgggtgcacatgcatgacctggccggtgggtggtgtcaggactctccatagtactcactgaggcatggtctctcattgaactgagagcttgccagtaaggctatctgggctagctcccttcctctggggatcctctatcttcacctcccaggcactggcattacaggtggacaccacacccatcagcatgtatatggatcttggggatcttaactccagtccaaggtacactggaaccttgactgtcatactcattggatggctcacagttttgtaaggatcccggccttcacacagttcctccttatgggctgtcacctgaacatgacacactaacctatttctcctcatcgtttcctatttattttgagtactgtcactaagttaacccatgagtgccagtggaaaccagagagggtctgggttctctggagctggagtttctggcagttacagacagtccaacatgagtgctgggaactgaactctggtcctctcttcatccctgccattttatattcttaatgcatgccctttgccagatatgtatactatgaatgtatttattaatctagggtttgtctatttgatttttaaagatgagtattaagttgcttcctggcctttagtataagatcttttgagtgtaaagatattgtttgatgagtagtgcaggtccaaaggcaactctaaaagacagttcgagtatccagaatgaacttaacctggcagttacataaaattgaccattcctcaggaacttgtgaaactggtttccctccaccaaaagtcatttcccttccctctcacagagggacaaatgtctacctttaaggttgcatatcaaagatcatgcaatcatcaggttctctcggtattacagtaactgtcatatatttcaaagtccatgttagcatcccagttcttcttatctcctcccctaccctaaattccttccagctccccctagttaggcatccttcttaaagtcctgctattctccctttccctccccctctaactctccttctttcccactatctctcactatcttcctgctttctcattgtgttctaccctttgctcttgctgtcttcctgctttctcattgtgttctaccctttgctcttgctgtctcacaatctccactattctcccccacttccctaggcctggccatctccagtttgtgggccatgactagtctgcttctttctgtctctgttctctctcatatctacaataaaaaccttccccttaaccataccatggagtggtcatgttggcagtttctttactgttccccctctcatacaatcagaaaatcttcatcttgacaatgtacaattcattgtctttctttgttgaaagtgccttttccttctaaataactcttatctggactacgttcataaatatatttcctcacttcttctgagaacaatgtggcttgggtttaaatgtttgagtcgagtatctatccattagagcatctcaagtagataagtggcatactttgctccagattatcaattactcaacaaattaactgcattgtaatacactggaaggggcaaggacagaaacaagggagccgtctagaaggctaccataagaatctaatgatagatcaaaacactaagatggtgttaggaatgatgagatatagctggatttgggggtgtgttggggagagcacctttcctgactgacaggaagaatttgagatgatgactacgttcctgacctgtcacctagaaggcgtgattactattttgtgatgatgaaaaggattgggaaggggaaggtatccagatatagagggatcagtagtgttgtttgaacaaagcaagttagagatatttattagagatgtggacaaggacattagtatgttaggatgagctagcaaggctggggctatccatgagggattgtcaggatacatgcagttttaaagccctcgctgggatgctatcactcagagaatgagcagacaggacagagacttggtgcccacgcttgagccataggatgctcgaatgttaagaagttggaaaaagataatctaccaagaagataggagacttataataagtgactaactagtaggagaatgaggaagctttggtagcttgcaggtgaaataaagtatttctggatgaagacagtgatcagtggtgacaaatgttaggagaagtcacagctgaggactagcattgggctcagctgcacagctaaccctgatgagagtcattttggtagactagcatctgccatgaggaaaacactggaagaaaagagaagcctcaatatgatcaaagtcctggcaaacaagggagaatgagatggccatgagtgcagaggagtggtgagacactctaagatttcagaacttagactcaccctagagcattgacgtgaactccattatttgcctttgtagagatgaaggactttgaagttgtggatgctagctaaccatggttcaatcctggattcgtaaagcccttgggcactgatgttacccaggatagtcagggcttgagaagcagcaggcactaaacccctaaaagtgagacgtgttctcagcgaggactgggggcttagtcaggagtgcttttttttttttttttgtctacaaataggacaatgacacactgtttaattgccacccaaaacaatgcaccatccctgttttttcttccattatcaggatggaacatttaaggaataaaacagctgttcagagttttagggatttaccaaaaagaacaaatgtgtcttgtggcgtgtcctgtgttctcccattcaaaatgagttgagctgaatgattcatgggtatgaatcacccatgacagctgtcacactgggtctctaaagccggcatggattcactgagactgaaagactgacacctctctctctctctctctctctctctctctctctctctctctctctctgtgtgtgtgtgtgtgtgtgtgtgtgtgtgtgtgtgtatgttcagagcatcacaaatgaaagagtttaaacgtttcttatctgaaatatctgtgcagaggcagcaatgctaaaggcacaggtttgacgttttcctgtcttattagacaacagatactaacacagcctgacatctgagccaaatccaaatggtttacagaggactatagcaatcgtcacttgatagaagtttcacagttaaaaatgagaataaactaaaacacattttctttactttgccttgagcaagggctttttgctttacaggaccaggaactcatcatctgacagaagtctgggttacctaggaccacgggatgtctaataaaagtcacaaatgaccaagtgacaggctcttacctaaaaggttccggcacccctccctggggtgaggacttctggggctgtggagtgagacagatcatttctggagttttaaccctgctgcaactctgccctgaaaacttgggccaaggctgtaccttccaccaagacagatgcttatctgtcatcttttgtaagaactctaagttcagttgtcatagtaacatgagctggcctaagtgaatcctctggtccagtccaatgaatgtgtcctttttcccttcttaccatcttccctccaccagtaaaagtaaagccctattcaagactcggaatctgccacaagacacacaaagtaccttgggaagcattctaaaatgaaaaactgtgttactgtatagtctcaagtcaaatcaacactgtcattaagcccaaatttatagattgtgtggattggggcagttaatggataaaaggctcagttttctccttggtgacagtgtcatagccccccatctcagatgatgaccaatgaaaagtttcagtgaaagagtgtgtagaagcacttggccacccctacctgagctccaagtctcagcagtaagagttgacttttaataagcttaccaaacactgattctcctcatccaaatgtccaaatgtcataggaaagttaaaagggggagaaaatactttgtgagggcttgttcttatcttagccacagaggagaccaccagaattgacatgatgctgttcttggttgtcaacttgactatacctggaatgaaccacaatccagaaatgaagggcacaactgtggtctggatctagaggctgcaagacacaggcttttgctctagatcttgaggctggaagacacacatcttgaatccaaacattgaggtgggaagacttttaacctgggccacaccttccactggaagcctatgtagggacaatagaagaagaaaggctgtcttctttgtttgccctctccatgccagcacgtccattccttcactggcattggagtctacttcttttgggattccagtgtatacagaagaccagctgagacacctagccttgtgggacagattcttggactttccactcacagctagacattgttggattaggtggactgcagcctataagtcattccaataatttccctgtgtgtgtgtgggggggggcggtgcccgtgtgtgttgagagattcattccataagttctgtgaatctagagaaccttgactaatacaatctgttacttaccccttcttatctggaagagtgtcatattctacccaataatgtccccaaacatcataaatgctgttatcatgatgacaaggaacaatgggtatagggaggaactctctgagatgcacacacacacacacacacacacacacacacacacacacacaccacacacacaccacacagagagagagagacagagacagagagagagagagagagagagactacacagagcactagatgggcattttctttccccctacgtttgaccctgggagttcctgcttccccaggtaccactgtcgggaacagaggttcacagaggcgagccaaggtgaaaatcaaccaacacaatactagtgctgcttaagggaaattgctgtgccccaccgctaccaggttttgattggcagcactgaattggagactgagaatttgcttttctaatcagcttccaggtgatgaaaaggctacttactacctcaaggatcatacttgggaaaccactagtgaaagaaaaggggttcaacatttctgatttttcatttctagttaagctattagatcaactggtagctctaatgggcaagactttgttggctatgtgatggggttgctaatttcatggagtgactgtttcaagtattaagtaggattttttttttttgccatgggttcaacacacgtactcatgattactagttatgcagatacagccagtagccatgcaccctgggagtatgcagcatgtggccttggattccgtgggtagccatttcaatgcacagagctcagaatttgttcacttctcctgacacctaggctctctctaaatgcctagactaaaggaagatggggtgcccggtctcctttctttcccttgtgtgcctctccaaatacaaccctaaagctcactccaatgggtgcactttaccatcagaagactcaggcattgcttgcactcctgtgctcaaaagagagtgtggtctactaggtaagaatgggtgagcggctgtggtagtgatgactgctacgcagcaccttccctgggactccctgtatgtcctgtgcaaatggcctaactttgctgggctttggatatcctcttgttataactgacaaagagaagccttcttagcaggtacttttgagggcaaagtagtccatttgagaatctcttagaggtggagagttatggccacatcaaatatgaaatctagggctatgcatgttggtgcatgcctttaatcccagcacctgggaaacggggacaagtggatctcttgagatagtccagcagttaggagcactagctgctcataagaggacaagagttcctgttacccatgttaacacttcgaatttgcttgtaacaccagttgcatggaatttaataccttcttttggcctccataggcccttatacacacagacacacacacacagacacacacacacagacacagacacagacacacacacacacacacacacacacacacacacacacacaaataaaaaataaatcttaaggaacatgagagtattaaaataaaaaataaggtaaagccaaaacaatacttaatttgtaggtagggagactctggaacaaaactaaaacaagaaaaaagaaaagaaaagaaactaaggaaaagaaaaactattgttcctaaatggaaaaattcataaacaaaattagatgacgatttgaaggataatatcaagtaaaatattaatgaaaattaaaaatcaatacaattaaaatcctcctaaatgtatgggaggggcaaaagaaaagaaatcacatgggaaagacaaatcaaacaaactcatttttcccagtgtttccaactgtaatccttccagtgagtcagctccagcttgctgaactaggagcattctataacacttgcaagtaggtggagaaagaatgttcctctctagattacagctttgctttgtttctcttttctaattagtatattaaagaatttttactgttcctgctcttcagcatctctgactgtatgctggggatcccaaggaggcagagccactgtcatcaccctaaaacactgggccagggcctgctccatgctggctttctggcacttccttggtgtgtcaatactccaagtttccataatcccgaatcttgatcccttttcagtgtttcagagaaatcaaggaagttaaacagagaggaggtttctgtcttccctaagagactcaatgtttgcctgcccttggtcctccaccttcctggaaagaagccaccaggaggggccactcagtgccatcctgctttgccgtttgttgccttgctgtaggctgaagctgagctggaggtccaagtgtgaaggacatgaaaaggccttggcttcaaagtcctgactattctggagtgaggaaggcacaagaacagagttgatgccccgtgggtttggacaagacctcaaagcagaatggtgagtgaccaggaccaggatatcattcttcagtgacagggtcctaagtggaaggcatccaggacatgagaggatgaagaagtcaaaaaagctggtgtcaggacatcttgcacaagctacattttatgccaaacaactttattagtaagtagagattcttttatacagtttttaaggggagaaatgggacaaagtcagtagaagccaaccaagcaaatttgcacaagggggacacagactatgtcaggggtgtcacagtccaagctcacagcagtgttcacacagataactccactctcttgtgggggacaagtttacagtaaccaaaaacttaattgcttcacagctcagactcatcctaggccttgtcaagtctgctcctgggcaaggactgggaactaggctccttttgtcttttcattggggctggctctcaacaggtaaggaaataggaacaatagttgtagctattgcaactgagaaggaaaaataagcaaaatgggaccttgtgctaattttccaggtgccaagttggtttctttctgtacataaaggttcatcctgttgaaatatgaaatgaaggtcccttatcctataatggctgtaacacgtccacttaagcaaatgaaatgtaattcaatgtaaacaacaaaaagtttgatattgtcctatcagaaaccaaataatctgtagctagaaaccagcaatcaaaaccaacaaccctgtctgggaaattttccctgtagctgatccaatattttctttgtgttctgtgttagtcagggttctctaagggaacagaactaatagaatgaatacatacatacatacatacacacatacatacatatatatgaacacatacacacacatatatgtatatgtatacacacacacatatatatatatgtacacacatatgtatatatacacatatacatacattcattagagtgatttacaggctatggtcctgctagtctaacaatggctgtctcccaacagaagtctgagaatccagcagctattcagtccatgaggctgggtgtctcagctggtcttcagtataaattcctgaagaagtaggttcgaatgccagtgactgagagcagggcagacaggtagacaaagagaaatccttccttcttctaatcctttacataggctgccacaaggtgtggcccagatttagggagggtcttccaatcctgactatcatttgacgaaacagcttcttactggggtcattagactctgaggatcccacgggcttttagttaatttcagatggagaaaaattgacaaccaagaacttcaccctccagtgggtctctgaatgatgtggtctaatgttgtattgaatgggacatttaagtcaaatcatggcaagtttagggctgggatggaggtcagtggtagagcatgtgctctgcaagggaaggacccagggtcctcacacacgctctgcacatgttcttcattgtgtctgagtctgtcgtctaccaatcttcacatgaattgttgttgaatacctactgctttttgtaattcagaaaaactggccaggaaagggtaaggaatcctttcacattcacagtgtaggaagggcagtacgccacctgagttcatgacgagtatgaattccagtaacaccggaccttgacctgggctgtaaacagttcctccaggggagaatgggaagtttacaggtgtgtgggaggtgaggtggggtggcggcttaggagcactacctctggggtctgattgggctagtggtcagaatttcatggcagctgcactcaggtttgatgagtaaggaggtggatgacacacagccacgtgtgctattccaagcctggtgctttacggagtcaggagccacagaactggaatgattcagttgattccacacatgaaaggtgatgctttgacaacactgtgaaggatgggttggaaagggggtggaattgtgttgattcactcactcatttccagacatgatgaacagaccccggggtgaggggcagagaggaaatgatagtatcctacaaaagagacgacggctgagccagtccttgtcctcctgtgacctctcaatagatgaagaagacccagcagagcccatggggtatgcatttagcactctagggatatcagaactgtctagtgctctctaagatctctggggtcacactatagtattacttttagcaatagcagcttctgaaggtttttaaatctctacaaggttgtgttggaaatcagtgtggtcatcagaacctcagggtgcactgatacaatgggagacagacctatagaaatttgatacaatgtcttacaaaccctcccgggtagatattctataaaccgaagacagagaagagtgagctccaacccaagcaggtctttaacactacttctatcatgaggggtgtgtgtgtgtgtgtgtgtgtgtgtgtgtgtgtgtgtccacacacatgtgcatgcatgcacatgcagggtacttaaacaccagccatgctttcctgaaagggaggtaatcaggatccaggagctagatactggtgttcctggaccctgtcgtctgactcatgatattcaagaccacttcagtcacagcagtcctcagagaagatgaggcttcagtccaggaagccctcagcagagtccctggagagttggaaggctgacccaaaggtagtggcaggagtgacttcactaaacacatggatgaagcacactgcaatcacacggcctcgagaaactcaaacaaggccaagaggatgtgagaaagtgagattggaatgttggctcactcacagtcacactgactctaacagtaaacaaaagcaggtgacattcttttctttccattaaaaagcagtgactgatgtcatctccatccccaccaaagaactcacttctccagtgctcacccaatggcttcttccccttctgtggcttagggtggcaacagagacaatgcccagctttctaagagttaagtgtcctggcccctgcttcacccctgatggctttctgagtactctttgcttcctttcttcattatgaagacaagccatgaaatgctggctttggaagcatagatttctctccaagatctcttccagttcaactatctcatgtctgtgcccctctccttgctccatttatttgactcttttctctgttttttcttgcttatacaatctagcctgtgtgagtaatgttcatatgcttgtgaatacagttggttctttgtgatctgtgataatacgagatgggtcatgtggataaccccaactgcaaacgctgctcccgtatacaactgaggaacattccagcctgactaacaatctaatatttggtttggactgcacccctgtaggagccgttagctagttagtagcatgtgtatagagagattaattggtgtaccctggggagtaataggtcctgaggctgggattcccacattggccaaatgtcttctaccaagtaatagggtgtttcaaaatgagatctgtttagtttacatgattaatgcttcagttgatgaggcatagcctgcactcagggacagggtggaggctgaggtaagataaggtaaacacttattggagattttatcaccccaatgactctcaggaccaagtgggactacatatctttactccagagtgattcagccagcaggggctccttaggatctgatgtcactttgatgtatcctgtgggtgtcattgcgctgagtgagccccttagacctttatgacatgggatgcaacaccatagggagattagctctcatgtgccttccatgctcccaattcagaagcccacagatctgcaatgaaaatggacaactccacaaattaaatgaaaatgaaatcttaatcaaaatgtagaggtgtcactttgcttttcccatataaagctccatgcctaataaaacatgacattccttaatgtcgataatgttttctctaaggtataaattattgccatttacctagaaagctaattttgtaactgattcaagagctttaaaaatcacttcacaatatgtgaaaaataaacatatcatgttcatggcaatcatcctaggatcatagcctgctgtgctaccaaacccctcctctagtgatctagtttttaacaggctcctcgtgtttaattgtaacccaacagttactgtagaaatgggatcaatgatcttaggcataaaactgaatggattgaaaacaccatacaaaactcttgattattggtaagaggtgtaaaattattatacgagactctaggcttcaaagttctatgtgttgcttcagtttatgataaactttgatttcttttttgtcatcaaaactgcatgttcacttaacccttggaaaatacagtaaagacatcaaagaaaatgttaacgagctataatccaatattcagggatacctacaagtaattttttgatttatttattttattcttttttctgagttccaagatagtttgattataaatagatgagtagcttcatcatgatggtgaagatatataaattaaagatggtagacaggtggatgaaaggtagtgtcctagttatcttgaactgtcaacatgacactactgaagtctcaactgagggattgtcaaatcaggttggcccatgaacatgtctgtaggagactatcttaatgtaggagggcacaactctctgggcaggtggtctgctactggataagaaagctagctaagagccagacagtggtaacacacgcctttaatcccagcactcaggaggcagaggcaggcagatctctgtgagtttgaggtcagcctggtctacagagtgaattccaggactggcaccatagctcctgggaaatcctgtctcaaaatatcaaaagaagaaaaaaggaaagaaaagacagctagctagcttagcatgcgcctgcacacatgaaccatcgggcagcattgttcatggtttctgccaacttcctcggctggaagtgagtttcatatttagatgtaatgctgtgttgatcagtgtcttctttgccttcaagttcttgcttgccctgacctctcacaaatatggactgtaacctgtaagcttaaataatccttttcctctcctgcattgcttctgatcagtgttttattacagcaacagacaggaaactaggacagacaggaggggaggtagaagatagaaaggcaattgataggtgaagatagatggacagacagataattgatagacattattaaaatacttttgtggtttatattttagttgttcataagaattttcatgtcacttttttctaatgtattagatatcagacattttctaaaaatattttctaattttatgtttatattttcatatttaatttcatccaagtatgatgatttattatacatttctatattttattactgaaataaggtttccaatccttacttcccataatttgatcataataaccttttataaagatgtttgaggcccttgaataaatggtcaaaaagctctccagatacatggcaaccatttatagctcgacttacagtcagacaatacctctttggcattgcagttccatgatacttgaagctttgtgaaggaaaagacaagtggtatctcaaggttttatttttagttaatttgtacagttgaccacttttcatatacttccagcatgttctgtttaggatctttgccaatttttctattgagatcatcattacttgtatgagctattacaaactttaaatgaaaatacatatgtacacatacattaatcctttcttcatttatatttgtcttccaattttgttgatgattttaacactcaaacttttaaaattttcctgttttcaactctctttgcttttacatcattaatactctattgcttttatgattataactcagtcgatactttgaaggttgaagaatatttaaattttcttgttttgttttttttcaacatttaacttcatagttcatcttttttctatttttcatatattatgatgggaagacttagggggagacttttccccagactactagacagataatccacctgtgcagaatgcttgacttattaaactctgatacacatagtaggtgctgtggtgtgttgtctagactttccttgaataatgaagaatctatctctctactttggagaagccagcactaaattgttgttcttctcaggattacctcagaggaaataaaatctgcttaaggagggtcctatctcctctggaggcagcctcatccagccactggaccacgtggagacacagaagctcagctgtgctggtagcatctcagcccacacttgtctgtatgaccaaaacctttgtcatctcccttctacccgaaccagctcatctccgctctgcacagcaacagagcagcccctaaggcatgtcttgccacccagtctccaccccagaattgggaacatagcctctgactacatatatgaacaatctacagatctaaaattagtaaagtttcaaacattgaacatttatttccaagagctgctgccaatatttgtttcagagcaaaacaagccccaaatcagtaggaagttgtttgtcgctgttatgtcctctctgttctgctgtagaaatatcagcacatgggatgatggggcaccctggggacaagcagactgctggggcctagaggcatctgaaactgccaagttcctgtttagaatatggtcaagaatacccaccaaagatctaatttttgagtcctaaaatgcatctagccccccaaatgtaagacaaaagacaaagaggctatgtaaagcatatttcaaattcatccccttgcatttactatttcaatatcaccattagacaactggaagtctcagaaactctcaggtctcctccagcgctgccattcttctgtaaaagtttcttatttttgtccatttattctgtgagatgagagcctcaggatcatgttgccaaattatctcccattaagatttccatcgaaatagtaattagcataaatgaatgctggaaaaaaaaatccctgaatacttcactatcctcatctgaggacataaaaagtacagtctctggtttgtgtctgctctaatattgataatttgacatgtcttcagatcacctccacatatattttactagcgctggcaatgaccttttggttttatttggaaggcagctgaaagctctttccccactaattctcctaattgactattacttactcatagaagaagcgaacctcacagctttcattctcggagctacgttagttctccttccagcttctcagctggatgttcctctgtatttaattatgtcatctgcaaataatgataattttgttctctcttcaaatatccacacagcctctttccatttcttagcagagtgtgctggacagtgcgttcgtaagaaagggaggcagtggtggcagcagcaggaatcttggtcgtgttcctggtgggaattgggattgtctctgatgctccaccgttagcctccagcctgctgacgtttcatggcacttaaaaccatctgcagaaagattgttcttagtttcctggggctttcttcatcatctgtgagtaatatgttgtgttgtgccctacttttttgacatctgatgaaattaccatatgcttgtctcttttgaagcattgctgtgctgtaatgtattagtaggaagccattcttgaatcttaagatagactatttcctggcagcgagtgtcatcgattcctttgtatagatgtgtgtatgtgtatacatgctcatgagtgtgcttgagtatgctcatgaatgtggaggccagagtttgctgtcacacactgcctcctatccctcttcatcttacttttggaaagaagagctctcactgggcttggagctcctgattggctaaccagctctaatcatctctctgcctccatctgtggggctaccacatctgctcatctaatgttggcgatggggactctaaactcacacagtcatgcttgcacagcaactacgcaactggcccactaattctttacagaagtggagacttttcacatacatatccattgttgagatcaacctatacagcacatgttctcaaaagtgagcaaatggaacaattcacaaatgctgctgacataatcaagaagctatgacagacagaagaggaaaatgaatttacttaccaagtcatttcaattttgttacagaaagaaagcactctgtagtcaagagacaaatagaaacgtgttaaaaatagctaaatggcagaggaccaattctatattttacaaaagagatgcaatcagtaatgaaatgatcaatggctacaaacagaaaaaaatataatggacaatataatttgaagtagtgccaaacccttttgaaaattaaggaaatatgattcaaaatcataataaatgctcctttaggtactggaaaacagcaaaattccaaacattaacatgaggttcattttaggcaaggagtgtggaactcggcacacgcattccttttcattttttagaggaaaatttgatggtattcatcaaattaaatgtccacatctatccaatccagaaattctgctgcaaaggctttatcttagaagctaattcacaaaataaatatagaaaggcaaaaataaaccaaaacaactagctcccatagaagctgaattaatgaagacatcccataagatttggtaatatgtcataattaagaacagacagggatctgtgtagactgacatggaaatattcaaatataaaccagctttgtaggtttttattagaccatgtctctcactggcctgaaaaaacgcaaggaggctacactggctaaccaggtagacccaggaccaggggtccaactgttctgctttccagagctgagaatgggtataccacacaggtaacagatcagttttacatgagttcaggagttcaaattcaggcccttgcaagtcaagcacttcactgaactatccctgaccccagccctgtctctttgcatctaagtcactttcttttggaaatacttggcaatgttctattataaaaatagagtatcctacaataattctgtgtgtggcaaactgaatcagaacgtttctaattcttcttatttccttttcattttccaatatttataaaattatggaatcaaagtttcatgattgaattttcccataaagcactgttttcataccacattgcttttatttttaaaaatcataattataacaattgttttcaattaatgtattgcattcaatattagtggcttataccaatgttctttcatagctgaatcagtgtttcctgtggtaggaacttttgactcatctttgggcctgttcttgtatgttttccttttgaattcttttctattaaacatacgcatcttttgcctttgaacatgaccagcatttgaaaccctacctcgtctatctgtagaactctcatgctaaaaattttccatgaatgatccagatttttaaaactgcactgtgcactttctatgaagcatcatgaagagcaagttttccttaaagggtatattttataagttcctcctttgaaagcagctacaagaatttgtcattctatcaggaatttagccccttggaccccaattctcctggcttctgtttgtgttgattgttgtggtgatggtggtgatggtgatgacagtgatgatggcggtggcggtggtgataatgatggtggttggcggggataattatggtggtggtggtggttatgatggtggtaatggcaatgttgtagatttggatcaggaaaattttctatgggtcattcttgtttttgttttgttttgttttgtttctcaaaacagggtttctctgtggctttggaggctgtcctggaactcagctcttgtagaccaggctggtctcaaactcacagagatccacctgcctctgcctcctgagtgctaggactaaaggcgtgcgccaccacagcctggcctatgggtcattctttggtcatccttttgctcaagtttgtttcttctaagtctctaccgtcagtctctgtcattaatttcagccttctctccctcacctttaaatctatttctttggtcttcatagaaaactatcgtttgtcgtgtatattgctgaactagttttctttcatctctatcctgctggttgagaatgtaactctgtggtacagagcataccttgaataggcaaagctttgggttcaattcccaggtgtgggggggaacaatacagctaaccactctactcatcgccttcaaggtaaattttcattctcccattgtaccttcatgttccttggattctgtcctatcctgtgagctccctgctaacattccaaagaggtgtctccatagtttgcaaatttcttatgtttattgagaatgcatataaaataccatctatcttatttttgcatgtgctttccctcaagcagcaaccccctcagacagtgaactcttacgctgtgcccttttttcattggtttgaaactgttgtcttggggtttgttcatccttacataaaagaaatggagagagcaagcagatagatcagtggttatgagcactggatatttttgcagaggagcaaggtttggttcccagcacccacgcaatagcatatgactataactctagttcccaggaacctaaggccctatcctggcctctgctggcaccaggcatgcacatggtacacagacatacatgcaggcaggcaaaacactcatatacataagaaataaaaaaattttaaaaaatcaatcattttcttaaaaaagagaaattgagggcttatttttccactgagtatttcttattgggttaggccactactaccaccacccccaggagactagtaaataattggccaatagttgtcacacagcttctggtcacaggtagaaatgtcctacccaaaatcttttgtccttcactaggataaagtccatgtttctagagggcatgaacaatcaaatatacttaacatgagctaatgggtttagtgattggcacatttttttaatgcataatagcaaacagggaagccacaagggacggagaaaagtccacttagaagtctaaataggtttctgcctcctgaactctttcacagtgtaatctcacaagactcacatctatttcttcatggataaaatggtgctattgacacccacctcaaagagctgttgagaaaattctgcaattctgtgtgtggtgcagttcaatatcactcacacatactgggaaccgtccgtgtagaaagtcctttcagcaaaagcagcagcaatcaacattgtattagtttaacagtatttttgagagacgttcttttcacactttaaataaaacatctgtactaatttatttagtgtacttactaatcaaatacttgatgaatgagatgtcacttttaaaaaaagaaggcaatttaattagctttcctcataaaatatacatgattatagcaggcccagtgaaaaccactgatcaattagatcaaggtaatgaggatagtataccaaccaactcaagaaccggagttcttgagcagatgaaggagacaaaagtcaaatcctgcctgcagtttccttttgctctgtcaagctggagataggccaagtttgggctataaactattgagatctttcatggtgtgatctcagaaggtcacacctgtttcatcatgaatgaaacggcgctatcaacaagcaccttgaagagctgttgagaaaaagtcagtcctctgtgtggtgtagtcgccacatcaccaaatatgcattgctggagaggtggctatgaggttaagagcccttactgctcctgcagaagacctgagttcagttcccaggacccaccaatcagctcacaactgccggtaactccagttccaggggacccaaggccaccttctggctccacagttaccagcactcatgtgtgcacatttccatacagcacagacttagacccgtaaagaaaacaaaatatttttaaggaaggaaattccttctactgttgacattttttgaggatttggatacgtggaatgtttccagacattggcagcttcttgtgtggagagaggagagctcagaacctggagtttgggagcagcttaggaagagtcccatcccaatgtccacatgtatttgttcatatggaaaaatggaaataaactcaacagtttgcttgataattggatttatttctttcagacttcgtgggaaattgtgttttgaagactctccacaggtgggttctcggagccaatgaggtctgagtaccaaccagccaggactggaggggtatggtaagaaatgtggctcctcccccagaaccccccaggggccgggacggcacagcccctggaggctgcccagaagaaccccgcttcacaggcaggaaacccaagttctttctcttctgctcaagagcgccacctactgtgtcacttttacattgtctagatccaatccaggtaaaaattggctttattgtttgttttgtgttaagaaaagggttacatttttaaccgttcaaaattgtttaatgtttttttttttgtcattcttcaaatgtccatgactttagaaaagttccttctttctggaatgtttgccgacactacagtgttttctgcgagcgatttgggcatctgcaggttttgctgtcccttgcagacacccgtggggtggttgcatatagagaagaggtaaaattagagtggccctgagcactttggatgacttccagggctcagtggaattcagtttatagatcaggagaccgaataggtctttaatagtctcctgtccagctcaaatagcttatgattcaaaatggaatgtgttaaaaacaacaaaaccagagccatgtctccacagggatcatatgtccatgaaggttccacacagcagaaactggtctaagttgtgtccctggaagaagccaaaagagagagatgaacagaaaagcacgtagctctaccacacagagtctaagggcaggaggtcggtggtggggtttgtactaaagctctggcctcccactgaagaagggcatctggaggccatagagacccttctaatgaagaggcacgcccatgagggccttccagaagagcctcttttcccctaaactctgctggaacaatttgtacagtaaggccttctcgtgtgctcagcaggagccccttatcctcacaacaggcttctcagacttgttctttgtgatttagtgaacccatgaactcaagcaccctcttaccccctcccccacccctccatcccctcacctccttccccaccaccaccgggtataagagaaacagacagggactgtgtattgattaatttgcatctcacgaaggcaatgccctccaagagtgctgcatcccctgtggaaagagtggccacagtcattcctgacatcctccacacatagccctccaaactccccttcctctcaccccacatccaagtctggagaatgcagcagcttctgaaacagctgctgaaagtttgttccactggcctaaacacatagcccttggttttgtatgccttgggacccttggaagggtagggactctactgaagctttattctcaattatccaagttccatggcactcttgctttctttagatcagacatgcagggccattgagatggttcagcaggtacaggtgcttgcatgtgggccctatggcctgagtttgatccctaaatcccgccgaggggcaggaaagaaatgactctcaagagttgtcctctgtgcgtgcacacacacacacacacacacacacacacacacacacacacacacacactacagataaataatttagacttggcatgaatgtatcttggcatgcatatttgtgttacatacactctgtttcgctaaatctacagaaatatcatcaaccctcaacagctgtttctgtgacaatggcagatgcaacacctatacttgctatctgtggttggatgactaattacttccaaaatttagtagcttaatcgaggacccttaagtttgtacactggatattccagagcagggtgattttgctacttttcccgtgatgttgctgtcccacgttgtctaggttacagttctttgaagactcattaagataggagttgttcccaagatggctcactcgcatgcctgttggccagaggcctgggttccacggtgtgattggtaagtagccttactccaccaccatgtgcaccttccgtgtggctgcctgaatgtccacacaacactgcagctggtatcttctagaatgagtgacctgagaggacaagagaacaaaaaggctatatgcccttcatggtcttctcataaatcacatgccatcatttgtagcaggatctatggcaccataaatgagttgaagctgaacccatgctcacgggaggaggctcagggcccatgtgttgggggagctttatcacagagcacgcaggtgcatttgaaatggtccaaactctgaaaatggaagcacagaaagtccagttctgccagagaaaggaggatttcctgcaggtcagtagtggcttacagatcattgattattagatcctgacaggggccttaatccaagtattgggatgaaaaaccatcacaggtatgagtcatggtcttgttagctaattggtgggatgactgaattcatggcacattccagaaacataccaaaaatatagaaagggttggccttagaagttcccttcagcaaagatgaggtgatgctgaagactaaggtcagtccaaacaaagactgtgatgagcacaagagacaggatgttagtgtatctcacacatagtggtggcaacaacggagcagataagtgaagctttagagaactagtcatttcttgtttggaattatgtctgccaaatttttgtttgttttggaaaggagaagagtggcaaagactgtgccactttccatggatcagcgccactcccagccgttgtcggagaagccgctttggtttgtctttgtttgtttggttttaagactaactttattttactgaattatgcatatgtgttttgggaagggtggtattcgtacatgagcacaggtgccctcagaagccagaagactacatcagatgcactggagctggagttacaggtggctgtgagttgcccagggtgggtgccggaagccaaatgggggtcctaggagagcatagccgctgagccttcgttcccgcttcttcttgaagcagacggtgactgatgcagactcagatctgactgaagtgtggacagtgagggatggtggagtactcagccctaaacaagacatctacatcacctcctccaacgcccagagaacgtcacaaaagatcgggtggaaataatgtaagagcccgagacggggaaggtatactaggacaagacaccttctggatatggaatttccgttaccaccatgaattcactgcagctgtggttacccacaaggggggtacaagcccagatccatggattggaaggtgcttatggagcccccgccaatcctgagtgactgctggtacttaatagttactgaggcaggggtgccatttgcttcaggagtgtagccaccgatgagttgcctatacagtggtaagtaatgttccacccacacttatgcaagcaaccccagttaaaactaagtgggccacacaaaaaagacacggaagtagaagggagacttgttagggagaaaaattttcactgagagatgtaagaggaatatgagagtgcagtgggtgaggtaaaatgactaaaatttcttgtatacagatatggaactctcaaaaaataagggccagtgagatggatcagtggataaaggtgctggccaccaaacttgataaccttagttcaatcctgaggacccacactgtagaaggagactactttattcccaaaagttgtcctctgacctccatacatgacacacacacacacacacacacacacacacactaaaacatttgcaatttaaagataaaattaaaaatatgtatcatttttattgggtgtgttgggagtagatgggagagataaaaacaataacagaaattaatccttgacaaaaataaataaataaaagccaaataaagttgtttggcatgatggcaaatgatcaacttgtctgcgtaattttctttttcacattctaaatggttatttcagtatcacatgtaaatatagaaacacctcctcctcttctcccccaaccaaaacaaaaaagttgaaagcttttttggcagtgccaaaaacatttacacttacgaaacaaactatttttaagttacactgatagagaaagagagccttagatgcagacaacaccagacagtcactgtccatccttagcaggtggctgggtgtggctgattatataagcaggaggcaggctttcttggctagcagcagggcttctcggctggcattctggccccatgggggcatttactcattggtaggaaccatccatttacccctcttgatctgtctagacagagaactgtatttcagcaggagtgacagctttcccatctgacgacttggcttccactgaaatgcacgtggaacatccagacactagcttatcttttgttaagtgtagattccccacctcaaagttgcaagcctcctgggagcatctcctcactgagaggaaggctagagaatccacctttgtgtggtgctagaggacagtctgaacaggagaggctccttaatgaagctgcctttctcttatctctctattcttccaagtgtggtccatgaactgggggcacaggggtagctggcagtgcaaatccatggactcagcatccatgttttcgaagaagatgacatttctccaaacgattgctatgtcatttagatttgagaactactttatatggaacctagtcctccttgataaagactggggatctcacctaagactttgatagcatataaaatgtctgggttttccatctttcctccgcagtttctcactcaagtgtggcaggaacttgggatggctgtctagaccagtggtcctcaaccttcctaacactgcgaccctttaatacagttcctcatgttatggtgacccccaaccataaaattatttcggttgctacttcataactgtaattttgctactattatgaatcataatgtggattttttggagatagaggtttgccaaaggggtttggacccacaggctgagaaccaccggtctagaccatcttggccagtatttcagctcaggacttactaataaagttattcagacagactaatcttagctgaggcaaaagacacaagacttagaagccaagataggggaaaagggactcaagtcatacgctaactctgttagcattcttcagtttaccaaacttcctatcttccttctctcccaccatagaacaagatggtaatatgtaattgcatacaccaaaggcctgtgcttagatattgaaaaggagaacactataatactggtattttaaagctttaaaataccatatttggatgtcaatcactccccaagttatatgctcccatctgaaaatagcaagtactcataacactcaagcatttgaaaacccaccataattacctgcttacaagaaaacaataatacaccctacaaacagctcacagtagacgggaaggctcttactttcttttacaatgttccacagttgttacaaggctggggaagctgggaaatgtgaatgccattgcccgattcgcacaatggataaacaaagaactcctaaacacctaaggtaaaattcccaacattacatctaccaaggagctactctgttgttccagtcaggctctgaggtgacagcatgatatgtatatctactctgcacccaacacagttataaagaattctcaccttgcaccttgagagcttgctgaaggtttatactagcttatcatgggagtctagttgttcctccctggggtaaaattgcatagtgatttagaaaccaggatatacacagccccagacactgcacagaaattactaccattcttttcttttcctgtcttcactcccctttttggtgtaaaaagaaaaacatcagctcttgataaatatccaagtgtacaatgtattgctgttgactagtggtaaaatgttaacggatcttagtctgcttttctggactgaagcttgtgcccatctgtttgtaactcactgtttcccacccccatcagtccttataaaacatcagtctgcattttcagtctgtgaatttgactattaacctaatccctcacaggcagtcctagagacttgtctcctgtgactccggaagccgtctgagtgacgaaatagttcatgtttgtataggataaataggcttcattaggaaatttccctactgcacgctatgtactttggtcatctcacccacctgttcccctcctgggatggtggtcttggttgtcagcttgactagatctagaatcaactaaaagacaggctatgtgatcccgtgagggattttccctatcagattatttaagtgggaaggcccaccacaaatatgaacaataacccagataacaggagatggaagaagggagctgtgtatttgcctgcttgccttcactcttgatggctagttcatcaactctgacgctgctacatcccttcactgatgttagaaccaaacctctttagatttcaagcatgagctgaagacaagaagccctccaggaatcctagaggccttcgacaaacaccagattaggactgctgaggcagccagcctcatggactagattctactggattttgttctcttctgtgccagattacctgggccacatcattagcaagtcaagctaataaattcctttttaatacatcttcactcagttgactgtgttcctcaagggacccaaaacacatctgccttccccatttccttcttcctgctggctcatttcctcttcccaaatagttagctcttctaattttatatctctttaaatttttatttatttcctgtgtatggatgtttgccttcatgtgtgtctgtgcaacataaatgggcctggtatactaggagagacactggaattccagatggtcgtgagctatcgtgtgggtgcaaccaaaccagcctgtgtcctcctcaaaaaacagcaagtgcttttaaatcctgagccatctctccagccccattttgcatatcttttaaagatgtgggttcttcacatgaaaaaaacttaactgtataaatacatcaaattttcattatccattaatcaattgatgggaacctagactagctccaaagttcagctgttctcaacagtacagtagtaagtatgggtatgtggcttagagcccgtcttttgtggttgtactcagaagtggtatacctggatcatacaacagttatatttttaagttttcttagactctctataatgatttttacagtggctgaactaatacgcctatagcgtattccaccaccaccaccgccaccgccaccaccaccaccccgggtgtatcctcgctggcgctgttgtttgttttctgatggtagccgtgatgaaatgggatggctttgattttcattccccttacttcacctgccttctacagtggctgcgccattttgcattcccataaggacacattagggctcagtttctccatgttcttgcccacaatataaagtaaccatcgtgatgggtatggggtgctagctcactgtgcactttgatttgctgtttcttgatgattaataatactgggaaatcttttcatatacctattggtcatttgtacacttttgcagaaatgtctattcatgcccttagtctatttctaaattgagttattaggttattttgttcttttaaccaagttgtcagagttccttatgtattttcgagcttatcctccaggctgagacaaggtttgtgcactcccctgccttttccctgaccagctgtttccttcagtacacagcatagcagagatctctagatagcaagaatttagcctgtcttccaaaaaaaaaaaaaaaagaaaagaaaagaaaaaagaaaaaaaaaggattaaaggcctaacattttgactctcatttaaactgtaatttcgtgaagtctgtagagctgggtttaactctcttattctgggattctcctagtttgttttgatttggtttggtttggtttggtttggctttgttgcaaaacaagatcttgttatcccacctgacctggattgaactcaggatcctcccacctgagcctcagatttctgggattgcagaggtttacctccatacacaacctattgtcattttcactcactgttacttgtatggcttgcagtggtgtgtgtgttttcccacatcgtggaagaagatctcactccaactagtgtgcatagatgctccccaggagaatttagttgttacagaaaaaaatattagggctaatgtctatcccagagctgtctcaaagcacaccatcttaatgaaattattcaaagcttgtggaagaaggtccaattaataataataataataaccctggtagatctctcagtggtgtcaggataatgctagctgctgggaatatcaaagtagtaattatgtaaacaagtcgcggcaccatgtgagctgggtagtgtgggtaggcagctagtgggacacaagcaggctcggtagtcattggatgcacatccctcatcgtcagttataaatataggttctggttactgatcaaagaattcggtctcaatctcttctctggccctgggccatggtacgccattctaaagtgtctagaaggtcatgaactaaggccttttcataaagaatacaaagatctatcattgccccctcacttaagagttcatcaaattggcctgtcaatcacctgtataggaaaacacccctcaagaaaaagtgtctgttccggggactttggacataatagaatgtctgcctaaaggtataggttggtacaataaagagtctctttggtcactgttcactctcaccccttaagagccatccactttaccatgaaatatgtcccaccaaccttctgcattttttaatgtttaatctgaattcttccaacaaggctcaccaagactggggagttgagggaaaaacagagcaagatcccacccaggataataggaatgcaaccatcaataataaaaatagggatgaagatcagtaatagttccagtgaggtgagggacaggtacaaagacaagccgagtgagccttgagaggtgagtagaccctgctaccaggccagggtgggaaagaattccatagactgtagccggaatgacaaacacagacactgctagctctagtctcattgcacttggggcagacatcattaaatggccgctctgctcttccctcttcaactaggtaatgatccttgcaactttagcattatcacatccaaaatggtaggtaagggctttgccatctggtttcagtgtggagtctcttctacaagcagacctgatcagagtttgccaattagagtgtctcaatccagtaatataccaacaccacttaaatagccacagctgtgaagtccacatctgtcttgtgcttgcatgcaagcacatacatgcattgtgtgtgtgtgtgtgtgtgtgtatgtgtgtgtgtgtgcaggtacatatatttgtgtgcacatgtgtatgaaagtcagaggataaccttgggtatcattcttcaggcaccaaattctctttttttgaggcacggtctctcactagcctggaattcgctgattggctggccagcaaatcccaggtatctggttgtctctgcctccccagcactgggattataaatgcaaatccaacaattggcttttgttacattgcagggattgaactcatgaccttatgcttgcaaggcaagcatttttctgactgagccatatccccagtgccctgcatctcccttttcaatgttcactgtcagatggagggagctcctctcaagtgacacttcgattgtctctgtcattttattcgtgctgcctcagtaaaggcagtctgcattatctaatggccgaacttgcacgaataaactagctgtccttagcttatcctctgagtttctttttgagcatctcacaagtctttcttatgatttttgcagcctgtcctatccagcctaagtgccaatcaaaagggctatttgacctttaaagtataccctgcaggaaagtgagacctataaatagatagactctcaaagcttacatggaataaagaaataaaagggaaaaatgccactggaggctcaagaaggcaggattcctttgtgcactctaatgtcacgcatgtcccagcccaaaaaaagcatcataaaatgtgcacatcaacgagatgcaatcgctcagtccaggcctttggtatttggcagggagaatcaggaccacatgtttccaaagttcagctactgcctccagtgacgtctaacagtggggacggagctaacattctccactgtgagaacttcataatgtgtatacaacaccccaccaactgcagacgttggaataggggtatatagattgttggttgagtgtgattgcacatgtgtgtgtatgttgggaagaccaagacacaggagtgagagcaccctggcatgtagataatctcagtaacaccccctggtaaacgatgtcctctgtgtctgttgctcttccattaccatctttccactctttccattgagagatgaaactcctcttttttaccacttgaatggggcctggcctgggactttctttgaccagaatgacactgcatggtgctgaggagacttctgagaccttggagctcccccttttcactcgttcagacttttcctcacaatgtcaggagacccattcgagacaactgaatgagaccaactatgtagaatgagccacagtgaccggcaaggccagggctccatttgtaagaccattctccaccttctagactcaattaagctgccaggtgatggaggccttacgggtgaccctaagttaaaccagcagacaagtcactctgttgacccccccccccagcaacctagagatttcaaagaagcaatgaatccttctggtaatcccatctattttgtgagatttgtcccattgtgaagactgtggcataagaagttcacttctctatacacagaaggctttccctgaatttgtcccaccattgaatatggaagtcttgtgtcattgttttcaatttcttcaagagccacagacttcctccttcatagacccatggcatccccttccttcgctctcagttactctagttagaccctacttaatttttcaataagaaattttgagtagctacagttgactaaatcatttccttcatatactgtcctctcaacccaaagtacaccccttcctgcaaatccatcttgtaccacctaaaatatctcctcttcctatatttgctaaagtaaatgaactgcagtgggcgaggatgggtgtttcttgccagaggaccccagatgaatccttatccggctgatggcacctgccactctggctctgcctagctgggcacagaggctaactagctgctaattagagataggcaagccttacaaggatttgactctgattccaaattgcaaatggaacttgcatgtttgcatgtggatttggatttagacgggatgtgaacttccctttgctgattaacttgaagctcttgttctcaagcccagccaaaaggctgcacgctctctgctgtgtgggaacacacaggcaggaaaaacgacacgcacttttgaagtctatttggagggtctgcatttgtatgtcccagctgatgggaaatcatagattcatgttttgagttgcacccccttcctacaacctcattagcaccaaaattttctccaagttttggggtctggggatgttgttgctgatactcagggatgtgtctctgtctatttttttccttattagagggtttctttggcaggtaacactggatggaatagtcaaagaggtagtcatgacatttggttttcatctgtgtgatgattaaatttacaaacattttcacagagatgctgcattattctgggagccttatgagctggcaccaattaatatcttgtgtgtgcttgaatatttaatccttggtattcctattttgcaaacaatatgtaagatgataaagcagttgtagaattaactatattatgctgataccccgtgtttagtcttagtctactaatgtgtaaacagtgatcaaacaagagctatgagaattctatcataagtacttggatattgaccatgctgttctgaaatgaactgtaagtaattaaacgttggctatagagaaatggcaactgagagatgaattcatgatgcctttattttctgtgaaatgagataaaagctcaggaaaggggtggcttgtttaggatggggaaagcttgttggtgaatctgattgaaaccagttgcagagtgtgtgctatgggacacagggcctggcatggactgacagtcagtcatgccgtagacacagtcagcttgactgcccacaggttcactcagcatttatcttgttaaatttgtgccactggaggcacagtccttaactctccaggctctggcacttctgattagttttctttatgggaaagacagaatccatttctcagagtggaatcctcttaagcaaacctacagttggagatactataatccagagtggagattttattatagcaaggaataccattttttttctccttggctaaacacacagaatggtagctgaaatgttgaaatacattttggaaggcacagccatgctccaaagcatacccatagacccaaagctaacgagaaaagagcaacagaagcaggagggagcgagccaccttcagatctccaggacctgaaaccagaaaggtaggtaaatgggtattaggccccatcattgacagcgtgggtcagatacctccaaaataagatgatttcctgtgcagtgtaagttgatcggcagcatccctgtgcttggctcctacctaccagcagcacctcccaccccctcaccattccgataagcagagacgtctctagagattggctgttgaggctcactgagaaaattgaagtgtttattgtaggtgctagacttccaagacaagctacattgtaaacgtgaagacagaaggggagcagtcctgcttatgaaccagcagttctgcaaggggtcctccaggattccagtgccagatttgaacggatgagatagccagccttgtggaccaaaggactaagagattccttttctttgtgagacagtcattgttgctctcctcagaccccaccctgaaagccagtctaatcaatctctctctctttttttttttttcttttgagacagggtttctctgtggctttggaggctgtcctggaactagctcttgtaggccaggctggtctcaaactcacagagatccacctgcctctgcctcccgagtgctgggattataggcctgcaccaccaatgcccagcttcaatctcctttcaatgtatctgtatccattctatcagctccgtccccttagggaacacttactaacacacctataagtgagcatagagccaaatgttcttctgcccactgatgagccactgggaggagccacacggcacaggcggcagaacagtgatcctaatgccaacactgtctatggcactggggccagaacagtgatgcagaatgccaacagtagccatggcactgggggtaggagatgaagaatgccaacactgttaaagtgaagcaggaatctcagcataaagacgtggaaatcatgggtctctgcagagtgttatcaccagcgaagcaaacccaaagtgcttgctttccctatgatctgggcattttcctacattatgttgtactttgccatcaggcaagtcagtgttcatcatacatggagcagctggtagatggttaggtagaatgaacacagtaagctcaccagtcttcatccccaagttcaggacagcaaatacgctaggagcatagtcacatccccccagcacacagtgatgacaatttcccatcaatacaagcccttggtctctcactgtgtgtgccactgtctgcattggaatgacaccatttttggagtggatagaggatagcaaggaaggaagccctctaatagccttagactctaagcacaaatgctctaccttcttccaaacacttgggtttcaaaggtggaatttaagagtctaaagtactctaaaaagcaattgtttcttttatttattttttgaaaatataacctcaatttcctaatgaaagactcttaagaaggagggcaggagaatacaaagttgaacatgttaaaatcttttggaccaagtgcttgtctccagcctgagttggatctggtctcatgctctgcaaactgctcagaatgggttccagaaataagtaagaagatgacacttgcccactcattatccactcagaagaagtttcaccatacagatttcaaaatagcaaaggaacataaactaagccaacatgctgaagcactggttacctctcactctgcaggaagaacttggtgttgttcctgttgctgctgttgttgtcattatcattgacatcattgtttttctataggaaaatttccctaactctctaggcctccactgccccccccccgtgtgtgtgtgtgtgtgtgtgtgtgtgtgtgtgtgtgtgtgtgtgtgtgtgtgtgtaagcgtgcacacacatagtcttcatgagtcctgtatatctgatcttcaggtcacatttcaagggcctcagagagaaaacaactgcatttgaaaaccacctttattactgtttaagcaaaggtgattttataccaggccactttctgtaccaagttatccttggtacatcttttgttgatgtttgttttatttattttgttttgctttgtttttgtctcattccttggtagtaaggaaagagataaaaacaagtataacaaagataaatatatatattatttgagacatatgtaaacgaaagattacttgtttaattcaaatttaagtagttatcatatagtttgtcatcagcctacaactcacccaagcacgtaaataatgcaattcacatgggagtgattaagagtgcccaggttggggtgccagacttccataatttcttggaaatgtatatgaagcagtatgtggccattatcttaccagacagaagacatggaatgcaagacatcctttctggatgacacagtcatgtcatttggtttcatgttgaaggcttaccgttgcaacacaatagcttgcacgtatcggtcagaggttaacattaagtatcttcctctattggtctccatctcatttcttggaacaaggtctctcactgaacaccaagctcaccaattagctagaagactagccagtggctgctggaaacctgcccgtctctcctccatcagtggcacccttagagtagcttgtctgcgggggctggtggcctgaatcaggtctacatgcttgtacaatgggttctttactgcgccatctccttagctcctagagcattttaagtgcatgacatttagagatggctaggttcctaacagtgatagctaatactcggcctttccagacatggctgggtttcctaggtcaatagctgagttcttgcgtagcataagtgaaagccttggctgggttcaatcactgtcactctcagaaagtaatataaatgcagcatgggacccatgccacccatgcctacccaggccctttctcagagggtaaaggtgaactgggttaagatcatttaaatgatactttgttttgtttctaatttcgaaacttccgccccaccaagcttcttctgcatcactcctttttcattctcaagttcagtcaatgtccctaccatccacagcttcacaagtcagaaacctgggtgccacccagcttccccttctccagggaaacaggtctgtccggtattacgatccggtattctgatcatgatctcatcttgtccacgttccaaccacatcaacctgtccttgtctggatcgttttccatgtgtctgggaatgacttccatcttcccgcctccttcagcctctcttcctctgagctggcacactgttgtatacatcatcagactgctccaactgaaatgctgtcctgtgtcactgtgctacttccagccccctcgggccctgagagcctgactgtcccgaaccaaccggcctcattggctgcctctcctcttccgatcaccttggactttccagtccctggacagtcgcctgcgtctcccacgccacactatttcacacctcggcagctttgctaattctctgtcctctgccagcagtactcttagcagctctgtagctcagccagctcctacccatgtccttcaaaacccgcttgagtcattcccccttccatctgctcctgacctagaccccaaactagaataaacgcctccccttgtgactcttaactccacactatgcctctctagcaacatgtagcatataatgataaaattatttttcaatcattccttaaagtagactaccagcctcttgagggcaacagtgctgctcagtcactgaacatgcaaaaggaaacacatgggtgacgatggagaccagcagcaatgacaatgagccggaagcaagtgttagaatagaattgttcctgggaactttagagctccattctcataggcacaggcgccacttgcctctggggtgcaaaccacagtgacaacagcatccactgtggccagtgctataggtgttgtttctgctcagacccgcaaaggctcttctgctttatggtgctatttctgtctcaaggctccctatgggggtgcagtcctgtttctgagagcttctgttatattgagaattataggtacactcccaatcttagctcctggtgctccagagttggagacgagtatcctgaggttgaacatgagagatgatgtatgtggcatccccacagcctgtggagactccttcccacctttgctctacttttgtccctcagtgagtccagaggtcagctccctcactgagagcacccattctgcccctctgcataggaactaagaaggcagaacagcactgccacctcagcataggccaaggctccagtgccctgtcttaacttcactctctgcctccctccatacaggcagcttttaatgccaactattgttttgctcatagagatactccaatgcctgcgcacacaagactcctctagactttagtgtcgggtaccacttttcttcccaggggtttcctccacatcccaacacccgatgcttcttaacatcttttcctatttgaataaagcagccgtctcttttgaggggtccatgagtaccctgaaccatactgtctacagtatgcacccatgttcaggctggatgaccactggattacatgatggctttagattgtgtgtgtgcacaaaatctagatttccccttgatagaaaacacttgtgtctggatatattttcaaacaagttcctcggtgagtctatagaacagaatttctaaattagctaagtaactaaccccagattctcaaaaatgtagctcatctcaaaagttccatgagccaactccatataattcgtaggctttgatttcccaactcatcctgagacatcatattcttaggcaattgctcctttcttacagattcattcaggcccttttccctggagataatacatgtggaattgataagaaatcatctgtttctatcttcaaagcaaatcataataaagctcattagtgatagtgattcatggtcagataaattcgacactaattgaaaaatcctacagtgttatctgctcatgcataatgaactactccagtgcctcccagcttaatacaaacatctgatcatctctcacaattttgtaagtcacatatgtatacagagtgcagtattcatggtgcatgcatacaagggtgtgtgtaggcaggttcagcatgcagggtgcatgcatgtaggttgtagcacgcagggtgtgtgtatgtagggtgcagcatgcaggacacatgcgttcagggtgcagcagagctctgtggttctatgtggtaaatatgtataaaagagatcacactggcttagaggatcagcagtgggttcacttatgagcctaccaccttgccagggtagctggcaggctaaactgagacacacaagcaatcagaccatctacctattgtccttccagaatgtcagtctccagagagagggctgctgacgagacatggcaggcttcccacaaagcaagttgtacaaaggacaaactcccattgctcacgggaagcatagtgacatcacttgatcaaaaaatcagtttacctaggacaagacaggatgcttctcaatgtgaagaattggacagaatttgaaaccacatattaatgcctcatcagatattaatggaaagataaggacatctttcatcatctcttaaaaaattcatcagatgaccactactgaacgcaggaggccacactcagtcatacagcaaacgtatagcaagagtgcaaactgataggccaagggcaactcgatgtcatgggctggccaatctgtagtatttgatgcaaaataattgccaacgtttaaaaattgagagagaagtttatataaaatctgaattttcaagttctctggggaaaaatgaacttgattaacactctgcttgagtgggagccaccagcttgagtgggagcctactggcttgagatgaaaagctacaccccttgcagagaagacaatctaggccctatcttctctcttccaccctacttacaatgccattggtctattccctttggaatttgaattagccacttctactctacaggtggaagtatatgcagaacctgaccctgtcagcagaggtacaaaatctggaataacagtgagctgtctgcacccacatgttttatcttagagccactgacactcccttacactgtcctgaggccgatcttgtgagtgaggtatgtatacctcaagagatgagactttttggtgacctgagaatgaacttttatttaaaaagacattatttttttactgtatgtgtgtgctcatgcatgtgccaggacccgtgagtatgtggatgcatgtgtacatgtgtgtacatgcgtctggagactaaagggcaatctcgggtgtctgtcctcagacaccacccacttcctttgagacagggtctctcctgggcctggagctctccaatggagcttggctagattggctgggcaacaaatgccagagaggtccttctgtctctctcttcccagtgctgagattccaagtgaacatcaccacacccttgatgattatgtgggttctgggaattggtctcaggtccctgagtttggaaagaagtgctttagtgatggagctgcccccaatgcccatcagtattcttatttttcgctctattaaaaaaaatcaccatcatagcactgatttataataatggtacaaatttactctttaaaaaagtgaatattcctggcatatgcaaaaactctttattatacataaaattaaataaacatgtatatatacataaatctgcatataaaagagcattataaataaattcttggtgtccctattctcttcctgaccatctatttcctcctttcttcagaaaggaatctgaagttcacaaatctagagttttccccaatgctttgctttacataatgacaacatatatgcatctcaaaacaatatatgtaattttgctggttttggcatttaagtaggtaacaatattattatatatattatatataatacaaatggctcacttttctcattgccaactatgtaagctgtatttacaagactaatccccatggaaacccatagatagcatccatccaatttccacattctcaggtatctctgttttccattttgctacaattcatatgctcttctgtagatgggcacaggttacttctgtacttctggatggagtgaaaaatggctaattgtgacttctctttcatgtgcatgctctagattatatccctaaagggagaatagctgagcccgaaagcatgcatgttttcaagttgtccaagtattagatggcaaaactgctttgcaaaagggctcacatccatcagcaatgagtgagtgtgggggaccgaatattttgggtcccagtctccagctgccgtaaatagcggtggcaccaccgggaagctccggcccactattgtattgttaatgccagtaaggctactactgtttaccatggcctcagggtaatatgcctcttatttgcatctgtatgtgcctaagcatctgaataggccctcacctgggcagaggtgctagaggtgtgtgaataacttgtgaggaaagaaggttagggggggaagagatgccagcaggccagagcagagagggaacaaagggggaaagggttttcctcgtggtattggcaggatggttaagaaacaccagaaaagatggctaataaagaaatgactctagttctacaacatggaactaagagctctctaaagatgacaagatgcctgtgtttgatctttatcgccgttgggttgctgggagcttctaggtccacacacccccactcaggccgagcctcatggctgccgtgggttaaagctgagacaagccgggtcatgacaaaatggctcccgaacatggggcctgagaatgggggaagaagccatggacaccacaaagaaacgggcaaggcagaggcttggacatttcgaagagatagtagtcgcgggcgaaccggttggagaagaagcatgggcaggaaaaagaagaaagaagtggctgaatgtggtgagtgaacagtgttaagtcaggaataaaactgcatataatggtagaaattgaaagacccccacccccgggctgtagcctttctactctggtcggcagctggcggggcgcgcgaatacatccttccctccttagcacttccctccttagcacttccctccttagcacttccctccttagcacttccctccttagcaccctccccgaccttttgatctctgcagctgctggctctcactccccgccccacgcaaggccaacccccgccggatcgctcggtcccaaggccagccatctggaccggcaggagataaggccatttcgcctggctattaaaccttgagaaaatgctgatttgatgcttttcgcttctgtactatgcctgttttcccttataaaaggaccctccttccggggctcggggcttggcaaaacagaagctaagccccggatatccgtgttattaataaatcctcttgttcttacatccaaagttcgtggtttcgctgattcctgggtgtgggtcttcttccacgaaagaacctctccgggggtctttcatttgggggctcgtccgggatcgagacccccgcccagggaccaccgacccacatttgggaggtaagtgttatgtggatccactgtcttgtctcgtctggtcctgtctttctgtctgaaaccatttcatgaactgcgcgcccgcgttggtagtacacagctgcgtacatttgtatttgacgggttcggactcccgaccctggctccaggagacgtcctggtagcgattgaagcattagtgggctcacctttgtacttttgtttttgagctgagatctatgactggacagcttcccaacctctttggagagggtcctcggcttgaaggatttgcaatccttaccggggacgaagaaggctggcccccttcttcaacgccttctcaaatcttactatcgactctgtgtcgaaaccgcgcagcgaaagcctgttctgttttgcttagtctttgtatcataaccattatctgtgttctactaagtctagaaactatgggacaaactatcaccactcccttgtccctaacactctcacactggagagatgtgcaggattatgctcataaccaatctattgatgtgcgtaaacgcaaatggattactctttgttcctcagaatggccagcctttgacattggctggccgagagatggtacctttaacctccaaactatatttcaggtgaaagagaagactatggatcctggaccacaggggcatcccgaccaggtggcatacatagtcacttgggaggccttggttcaggaccccccccctggatacgtcctttcctacaccccaagggctccccctcccttcctccctctaaccgctccaaccggcccattccctcaacccctagcctttccaatccccagctccctccccactccagcctttaccctacagcggtaaaggacgctaaagctgaagagaagaagacgcctgaggtgcttcccccgggagaaaacctgttggctgacctattgactgaagaacccccgccatacccggcgctgccgcccccgccagaggcagaagcggcccccgccgtctcggcagagatggcttcagctcccccacctgacccttccccaatggctcaccgactaagaggtcgtagggagcagcccactccagattcaaccgccttgcccctccgaactggaccgaatggccaacctcaatattggccattctcagcatcggacctctataactggaaaaataataatccttccttctctgcagaccctgtgaggctgacatctctcatagagtcggtactcacaactcaccaacctacctgggatgattgtgagcagattttgcaggttcttttaacctcggaggagaaacagcgtgttctactagaggcacgaaagaatgtcccaggagccaacgggcagcccacccagctgcccaatgaaatcgatgcggcttgccctcttgaaagacctgaatgggattttactactgaagcaggtaggacccatctgcgtctctatcgccagttgctggtagcggatctccggggggcaggacgccgacctaccaatttggcccaggtaaagcaggtaatacagggggcggaggaatcgcccgccacttttctagagagactaaaaggagcatatagaatgtatactccctatgatccggaagatccagggcaggccaccagcgtttctatgtcctttatttggcagtcagccccggacataagaaacaagctccaaaggctagaaaatttacaaggatatacgctccaagacttgttaaaggaagcagaacgtatttttaataagagagagacacagacagaaagagaagaacgttggagaaaggaagcccaggagagagaggaaagactgagaaaagaagcagaggagaaagaggctgcaagagaccgtaagcggaatagagagatgagcaggctattggccacagtagtgacaggtcagagacagaataggcagagggatggcagaagggggccccacctggacagggatcaatgcgcttactgcaaagaaaaaggacattgggcaaaagaatgccctaagaacccccgggccaagcctccacggccaagaacctctgaccttctaaacctagaagattagagaagtcagggccaggagcccccccctgagcccaggataacactgcaagtcggggggcatccggtcaccttcctagtagatacaggggcacaacattccattctgaatcggtcacccggacccctgagtcaccggactgcatgggtacagggagctacaggcggaaagcagtaccattggactacaaatcggcagctccagctcgcgaccggtaaggttatgcattctttcctccatgtgccagattgcccctaccccttactaggacgggacctattgaccaaattaagagctcaaatacactttgagaggtcagaagtcaaagtcacagggccagagggaattccccttaccatcttgacaatgtccatagaagatgaatacagactccatgaaaagaggactaattcgaacaatcaggaaacccttgatcactggcttgcggaatttccccaagcctgggctgaaacaggaggaatgggccttgccatcaaccaggccccaattatagtaaccttaaaagctgccatccttcctgcatccgtcagacagtatccaatgcctaaagaagcccgcgaaggaattcggccacatattaaaaggttacttgaacaagggattctggtgccctgtaaatctccttggaatacacctttgttgcccgtcaggaagccaggaaccaatgactataggccagtacaggatctgagggaggtcaataaaaggatagaggacatacaccctactgtccccaacccttataatttgctgagcggattgccacccaactatacctggtatacagtcgtagatcttaaagatgccttcttctgcctccgcctgcatcccaccagccaacctatatttgcctttgaatggcaggacgcagcccttggaatctctgggcagctgacttggactaggctacctcaagggtttaagaacagccctaccctttttgatgaagctttacatcaggacctggcagaattccgggttaggtaccccgctctaatcctcttacaatatgtagagaacattttctcatacctgttctacaccctatgtctccttagtgactgtctagctctgagtccaattgacatgttctttttcttactgacttacaggaatttgtttttgttcttgatgcaaaccacttgccagttatatgtactacagtatcaattatgattccaaagtttggtttggctttactctagtaaggggatattttactagaaactatgcatttatacattgttactgttttaatgacttgtctcctaagcctgaatctacaaatgtgtccgaccaacttccccttgagtgtttacgattttacatcttactagtaaatcgttatcccgcctggaaccatttctcttcacagtgtgatggtgatgtcagcatctcattcttccctgtggctactcacttctcccagtgctgtgttctccatcttctctcaagctttctgtgtataggggataaagctcaattcttcagcttattggcctatttctccccattctgctggtagggtgtcttaattagcatggcttgaaaaatactacataagagtttgtttttccagcctgtccttctcaagagggatttggttgttcctgtttatttgctctttaaatgtgaacgaatttcctattagtaaagaaaaattattatcactggcatatagacataattcagttttaaaacattaggcttagattccaggaaccttgctaaaaatcctttaatctactaatttgtctttaaattgtatgaatatttttataagagagaaaatcattgccgctaactaatggcagttttgttccacatgtatgctattatgtttcttatttgaaggatccttctgcctctttataaactaagatgtttgctgaggctttgctggaaattctcagcctggtagaaataaaaggctgtgtttgtactgatcccacggtgtatgggtgagaacactgacctctttggattaactcttgaactcttcatgttgggtctatgttcagtctctaggcctgatatcttagcaatttagataaatttatcttgtgtgagattagacacctccagagggcacaaaatctcacagacaagcttgcagctgggcttgcagacagctggactgagagtgggctaaggcctcaccaagtcctcctcccatgcgtgagctgtcagggtctatctaagaccacatactggctgtggaatctagggagtcaatatagtcaccatctcaatcaactaaaaccaaatcacctttctctgtcagccttcaggttctgttggttagaaatatattaactttctcaacccctctcttctatcaaccccacacacagaaggaaacgggtgtgtagcagaagcctggtgctgaggcatcagaatctagaaactagatggcaagaaattcaagtgagtgctggaaatgtgacccaggaggtaggggcacccattaccaacctaacgactggagtttaatccctgggtcccatattgtagaaggaagcaccaacttccacaagttatcctctgacccccatgcatgcaccatgacacacatgcaccaacatgcacacacacacacacacacacacacacacacacacacacacacacacacacacaatggggaaaggtaatttaaaaattagaaattcaaatgagtaatttggcagtgtcagctaactagagaaatttcatatctttctgatgttttagttaaatctgctttattgaaaatctgaaattccaagcctattaccaaaagtctgctgtctacccacataccatcagtaagttgagggcatgactgcagctcttgtgacacacaaggtagctgcttagtgaccagaatgcttaactatgcaaacctattgcctgttacacagattattcatctatttaaatttcagtctattgtcagtgctgtaattttaaaaaggagaaagagaaagagagagagagagagagagagagagagagagagagaggcgacaggtgtcaagcagaggttttgagtttaaaaaaaaatagaaaaagggatcataaaaaggggaaaggggagggggagaccagcctctggggacaggagaaacaggagagaggagagagaggagagagagaggaggtgggcaggactcttttaaaagggaatgtagtgaatgtgcacaggtggtcctcttagtggctgcagctgagggtgaatcctgtcagaaccccaaggacaggctaagacagatgtctaaatgctaacagtcagtacccagaagatggactcagggtcattgtacccctctgtttctctacccagtgggcattttcccatttctctgctttcacaactaaataacgaagctgaagccaaacatggcctgagacggcacagaaggtacatgttgaagaaaactatgtaaggctgtcttatgattccatagttcctagcaaacctttacgtcaatctgccaccatccctccccaaataccatcagttctctaaagaaaggatgacccatacaggtggggtccaggtgtccatttcctcagaggttagaaggcattgtatcagaagccaaatgagatgacctagaaacagagtctttaggacactcaggattaagagatttatatcacaggttatgcagcccagatacacatttcataaataaaatcaccccatggggccttgccaactcatgtaaaagttcttccacagcctgtatcccacgatgctggaaccaaatagagttgagaccctatgctctgcaaacctttattaaatacttagtctggtgttttacagaaaatagtaactgggtgaattttgccaggatgagctcaagtagctttctctcctacatcaatcaatgattgaaatgaagtttgaatgtcccctttgactagagaagcaaaggcgaatacttctgcaatggtcaaaacaggcttgtctctctgggtgggcccctcctacacaagtcttccagctgtctttcagctctgatttggctgtctgtacattgcctggattgtatttaaaatgtgtgtcgttgacagaggtttcccaaattataccacagattgccattaagcacagcttagcttgggcgggttgagggggggcaactgggagggataaattccacctgtcagggagttttagagtggcgcttgaacttatattaactctgctgcagttgctgtttgaattgggcatggcaggatggcaggtttctgccatgacaattattaatggaatattgcatttataacaccagagcattgttaacgtgagcacagcattcctagtgcatgtgattgtattccagttttaagctttactttgagcaaataagacctggttgttgggaatattaattgatggagaattcttattggttaaagcagagaagcataactgaactgtttatgaattcctttggaaaaatacactctccaatgcccctgatacacatacacactgtctacacacacacaacacacaaacacatgctctacacacacatacacatgtcacacatagcccacatacacatggtctacacaaatacagcccacatatacacgttctggaagtctaggaagctcttgagagtcttcccaatgtactcagttaaagtggcatttcccctttgctcttcgacactactcctgagaatctggatggctagactgaacaaacgtctttacccctccaagtcctgcactctctccttccatgtcgttcagctcagaatggatgatgctctttgaaggagcaaacagctccagccacctcaggtcctccactccaccccaggtgcctccttccccttggtttcagagccacttctcagcacagtgtgttaaaagacacagacttggaagtcagccaaacttgggatcaacctggaaacacattttcttacttagcagtttctgactcgcacagctccctaagatgtcagacactcaagctgtcacacagcctgtttccttctgcctgcactcggcctcatatgctgtgcctgtgtctcccatttgcccttcctgaatcacaccaggaaagtaaactcagagttctgagagtcatatctggcacagctcttagaaactcagggggaaaaaaaagcaagaggtctgattttaaaatggaccagaggtaggggggtggtctatgagtaaaccttggctgcacagatgtgaggagctgagctcagagctcagatcccagatccctagcatccatgtaaaagccaggtatggaggtgtgtagcaaccccaacactacaggttaaagacaggcaggtctctggggcttgctggacagctattctagctgaaagagcaaagatctgtgttcagcaagagaccctgcctcaaaaaaacaaggtgaaaactgaccaaagaaaatccccataaagttgacatctggtctccacatgcacaggaacaggtgaccacgcccacacatacacacacacacatgcatataccacacaatcaagtagcaataaaactagcaaataagttaaaatggggcagaggccttcataggcacttccaccaagatgtccaagtaaaaactaatcataggaaaaggttctccatatcgtgttatcaggaagttttgaatacaaacactgagatagatggcacatttattacaatggctagtatccagaactcggacaataacagtcaggatgtggaccagcaggtgaacacgcacagcatgtctgcttcaacagtattctgcttcctaatcgcatgagattgctcttcaacacatacccaaagtccctgaagacctatgttcacacagaacctttatacaagtacataaagaagtttgaccgacagatgacaaaaacaggaaagcaatgaagatgtcagcagcaggcaaataaggaaagaaactatggcatatccaggcgataggatattattcagcactaaaatgaaccatgctaccaggctacagaaggttgtaaaggaagtttatgaacacattgaggggaaccaacatgaagaggctgcctgaaaaacaaggccaactacggtaggatgctgtagataaagtagacgtaatggaggcagtaagattgttggtggtcagagtttagcaggagggggaggtggaagcaagaggattctcagggcgctggtgcatctgcaggaagctgtggcagtcagctcacaacattgcatatctctccaaacccatcacattggcaatacctggagtgacaatgctgtgcccacctatagtcactgagtgaaacacatgtaccattctgataggagctttgataattgaggattaatgtggggggggcaaggaaaatatgaaaactaaatgtttctgtgaacctaagtaagtctctatgccctcactcaggcccaaatctaattctagtcatgacttgaaagtgcttcacaaactagcatcttcaataagtatagactatatctagtatggcaagtacttagggaaagggggtctggtgtgccattggaggagtcagaagggttcctactgagagcacgatggaagagcagagccctacagggagaaaggcagcaggctatataggagagcagtgagcaagaaatccctaagcctggggaatccagaagaagtagggccaagggaaggaggggacagagcaagtcagagacagctggggccaggacctgcaagaaggacattagcttgctggccatgcggaggacttcagtttttatttcaagtgaagtgagcattttaaaaaaatggtgcaacttatatttggaagtggccactaaccctggtgtattgagtttgggccacagagggataaaggcagacatggtgagaccaattagaaagttttctaaaattccatgcaaaaaatgacactactatagaggcagacatgtgagactaattagaaagtttcctgaaattcctcgtaagaaatgaaattatcactagagaggtagggggtccttagagtggttgacaggtggtttagttcctggacttattttggaagcaaattctataggacttacagatatattggaaatgaagtattacaggaagaaaggaatgaaagatgactctgaggttttgatgttagctttttagcagatgggtttgtgtttattgagattgaaatgtgatgggagatgagaaattttactttgagtctatgccaaattagaggtacttatcaaacagataaatagtcaaaaacaccatttgacatatggatcaggagtttgagggcaaagtctgggctggtttctggacagacactccactatttgaaagttaagatatgagaatgaaccagctaagaaggaagaagatacgcttgctgtacgatagaaacacactcacgcacatgcaaacacacacacacacacacacagattgagaaagagagagagagggagagagagagagagagagagagagagagagagagagagagagagagagagagagagatcccatgggtcagggaacatgttttaagaggacatgtttaatcagttgtaacaaatattggtaataagctgggcagagaactgagaactgaccagtgaactgaggaaaatggaagtagtcacaccaatgctaattcctcatccagacagcctgaatgaacttcctctctttctcacaacaaggcataattgctacagggatcttatgacagtttataattatgtgttgtgcacttatgtgtcttctgctgggctcacagacaattgaacataaacttcaacaggacagggctaaaactctgtccaccacttggagccaaaggctggggcacctagagtggtacacacaccccacacacatacatgcacacacttatggacatacacagatcacatattcaatggacacaaacacacatcacaaatatacataaaacacacggatataaatacacttgtatgtgaacacacatcatacacactgcacaaactacacacatatacactcctcaaatacacacacacatgccagacaaactacacacatatacactcctcaaatacacacacacatgccagacaaactacacacatatacactcctcaaatacacacacacatgccagacaaactacaaacagatacacaccttaaatacacacacatacacagacttacatagaaacacaaacacaccacacaaatatacacaaagtatttcttagaagaatggggaaggaaccagcagtggaacatcttttgttcagtcacacccatttattccctcataaaaatcccagaagctcgccttggcctcatcattaacgaactccttcaacatgggaaaaactcacttttctcctttggattctcacttctgtaattgcatgaatgaatgacttttgacaaatctctcagcccacaattctttaacagatataaatctggcttccaaagatccaagctatggactattttacccagctcttcccacactgtgctcctgactgctttgatgccatgaagagatctgaccacaagttcagtttaatgtttacaagacacacacaagaaagcagctttgtcagtcgtttgtgtggcagtgtgagcacactggcctggtcacttcttgatagtggttttagggaagacttgttaaggaagaatgaaagtggaggtgctctatgctgtcactgggcaaaagggcacaaaaacaaagaccatagggaaagaaagaaaagctcctgagaagtctgatagaccttaagaatccacagaaaagccctgaaagagctttgcttcagtcttttaactccaaatccataccgaatgtcaagtaatagtgagaaagcagtttctccagcctgcaatttggtatgggtataaaaatgatggagttagacttgaccatttgcaaacaccctgccactgttaaaatcaaggcttctctgaccaggaaggaaaggacaggaggttgtttcagcctactgatagcaactgtatatttgcaaaattcacatgacaatctcagcctcgggaagcatttgtgtacatagaaaaattagaatttcttgcttgctcaagttagcaaaaaagtaaatggctcttgcctgtccctgaagaaggcaccgtaaatgtggtcagatgccctgtacatgtccaaggtcccagaactcattgctggaattgctttgggataaggctattcagggtttcttttgtctagcagacattatccttcctgtaacaaccctgccagagtcaacaacacattcagtgttctccatacacttgtgcccatacaggactagttgatctcagatcttgcttataagcaaagcaagatttttgtgaaccaagagacagcagagtcagtgattttaccccagacccagacttgcagattaaatttaaacaaacaggcaaacgaaagcaaataaaaatatccctgggcccagaagactaacaccaagtagagcagcagcagaaggaagcgagtagcatcaacctcattagcacagccctggggacaggagacatcgagttattggatggcaaggatgtgataagaaacttgataatgactgccactgctgaggtcaggtctgtctcgagcaaggaaagcaggaacttggcaatgtgcacattcatgaaggggtttgtgtgcttaaagaagctgtgggtgggacagttaatatagggcttttccatccaggaaatctgtatcccttccaaagcctggacttattaaaatcttgacgtttctcacatctgttacaaggcacgtatcataatctcagcacgctactggatgccgtgcttgggtccacggttgcaggcatgccagagttctcttacttgccagcccagggatcattattactggctgcccttggggctgccaaaacttaggaagcctgattctgtgaagagccatcaagctggaaggctgtgacctggccagctgtgtggtggtccaatgctcaatgccctaagcctctcacctcagtgtagccagagcccctgtgagagcagctaacacccgccctgggggaggtgtttcaacaactataaaattcctctaatagcttattcagagttcctgttcaccagaccaccaccacgtcaatggaaactgacttgagtccaaacaggatgaaccaaacttctgttcaagcaaaaaagttaccccagggctaaagggctttaaacggactgtgggtaatgttttattgcctcagtgctagagtgaactcagccccctctacttagcttcacctttcacaatgttatttttagagttctcattacacccagcttaaactaaaaatatgattcccgggaatagcagaacctacttttaattgtgcaaacagaaacaagtgctcccgcattctgattacatatgacagttcctgtgtctgacaccatgacaaggggcatgctctccagctgttggagttgatgcgtttgttttgtttttccatttcacttttctgcattggggctgtctctactggtgatgcttggatttctaatgccctgaaacagaaaccctgcttgggaagagttcacctctgaggaatgcccttaagtcactccagtccatctaacactggacaaccctgcactgcccgctatccctctcactgggaggtcgaggtcctgtggtagatgagctttggaatctaacaaatggcagctggctttgtaccttgatcttcatcctctgggacgtcagggacatgtctagtcttccctaatcttactcttccattaaaaaagaacaataggtattgtaactaacatgtactagagaggcctagtaaagtaccagctttttacttggctaatttttatactagtcaaaatagtagggacctcccgtaagcaataaggtgagatgagagacatgtgtaccgtggtgaagcatacgtaggatgaagcttacgtaggaatatgcgtggctgtgctacaggccagcatgaagcgccacactgaacacgaaacccagcctagactctgagaccacttacagttttcagacatctgtgaacattatgatgggcagataacttcacaatgcaatgtgaccactcactccagcagaccacagagaaaaaaatgtgttttgatgaggcatctggaggtcttgtgctcatgtttttcatctcacaaatcccactgtctgagaaggaggctcggtcagaatggattagacagcaatgctcaatgtggattgaataaatgtgagttaccagaggggtgaagaatatttagtttgagaggggtatgaggactcgggggagcaaaagggctagcacattttcaaaacaagatacctgtgagcatttggcagaagtagtgggactctgcagcactctcgtttctcagtctccggcttccctctgaacaccagaaaacttttgctctcctatttgttttctaaagagattttaacatacatagacaaggaaataaaatttcttgttttttcaaagtgaaagcagtcacttcccataccattgtgaataaacagcggagagaagggaaacgaggagaaactggggatgttcagtgtcatcctctccagggcctatatcccattagcctgtgctaactccagactccccgcacatggctttaagatcacagactggcccttcctcctcagctctgggcatacacagcctggccccaggaaaaaccagcacttcctctggagttgtttggccctgctcagatcttctctctgcctctaccccttagacttccagccccatacagcccactctttccctcacagcaccacacttcttactttgggactcatctgggcagtttggcagcccatgtctcaagcacagctctagggtatctgagaagggaacaaatggaccagggtgacagacagatagctgaggccaggtatgcccaactgccacagccccagcctagaaaaggatggccacctaggagcacccaatcctcattaatcctcccatgggtgagccaggatggtcagttttcgtcttcctatgatctgtgtgtcgtactttacactactgtctttatcttcaaacttgtcaatggacttgtgaaaacgttacacacgagcaaagccatggacagcaacagaaacagaccgtgaggaggaaggtgtcgaatctcaatgtggtgacagaaggacagaatcaagaacggcatcaagaaaccatgggctcaccattgtctttcatcagagccaaagggatgtttgaagtctctgtggccctacctggtaagaacagaaagctggctgtaaatgcaagatggactacacagttgttgaactatatttatcaaatttcttaatagaaagggcttagaggcctttgagaaaacacctttattttggacagtgacagaagctagcaacaagttgtttagtgtttttgctcagttgccaagtgggtgagttggttaaaataggaactgcatcagctctgtttgtaggaacgcacaaggttgctgtctgtagaggtcctgtgtccctgaacttcttcccaagacagaatcaaagtatctaaaaggagatgggcaggagcatcactgaagagacatgtgttcagatggcctggcgtccctccaaatcatcacactgtcctggcatgcagggagagctgggctaagcctgtctctgggatatgtgtgctatcaatttcttctaacccagtggttctcaaccttcccaatgctgcgaccctttaatacagttcctcatgttgtagtgaccccaagcatacaattacttcattgctacttcatgcataactgtcattttgccagttaggaatcataatgtaaatatttccagagatagaggtttgccaaagggatggggaccgacacaggttgagagccactgttaccacaccagctgattccacctaaccacaaatttcaagaaaactaaaaccacaatagcagacaatgtgatctggggttcatgtgaagctggggagattccaccatagagttcattcgactgggcctcggagacagagtgctcaggctccccactacctcatcatgttccccaacgaacaagatagaacctggattcagagtttcacatttgaccacaaaaccagtggaagacaatgcagaagaagagaacaggctcccagaggctccaatagcaacatcccgggtcctgctgccaacggcatcctctcaaagctgagaagaggtacccagccttccttccagcgtataaagaattcaaagactctgatgagccacacaagaaaattacagagagaaaatatcaggacaacccagggactaatgaataatgcaataagtaaaggcaaaaggctctttctggaactttttctaaagcgttgaatatttcagtgtaatgggatattaatagagcattttcactgtggtatcaggattcaataatcatcaggtataaacatatgaaaaaagctgtctaataacaacttcaccttcctgtggcctctgtctgaaggagaccatactaagaacgcacagctctcaacgtgggtgacctggatgtccaaaccctctcttcattcccttaagagaagactcaaaagtgtgacagtcacagatcctgtcctagctacttttctatgctgtgacaagacaccccagtgacagtggctggagcaaagtgtgctctcactcatggtttaaggtgtggtccatcacagtggagaaggctggcatgcagagcttccagcaggtggtcactgcacctgcagccagagggaagggagggagaaagcttatgcacagatagcttccttctttttatacactcaaggactgaggccaggacatagtgccacccctctgtatccccaccccagtcaacttagtcaaagtcagccctcacaggcatgcccatgggctaacctaatcgaaaccatccctcacaggtgtgcctggaggcttgtctcctaggtgatcccagatcctgtcaaattgactaccaacactaaccatcccaacatccttcatactctagggactagcatgaaccagatctttcctcctaagcagccctcctataatatgagaaatggcccattatagcataggtaacagcactagatggtttggcctcctgggacttgtcaaggtgaagcactcagtatttccaaagaccagttgtggaccctctgaggggtcagtagagcctcctgggcactgatgaggacatgtcaccacttgcatggagatccttgcaaacaagactgtcggcaagtacagcaccatcactaggcagaaaccctgcaagagaaccagaaggtattttctcctctctaaaggttgccaatctgaaaggttaggatcggttggaccagagcctgagatgtgaatcttgcaaagtggctttctgaaggagtgcttccagggaaaggtgagacaggaaagccagcaaccaggatgatggggtcacaggatgcaagccaaggctttgaactctgctaggctctgactcgtcactcatcgcactgcaagctctgagatgtactggaataaggaggaacagggcttttcgcttcttgccacttggtcactggttggggattcgtagtgtagtatacttgaagatatagaggcagtagaagagggttccttgggaaagggacatttccatccacccaaaggggacacctttcagctgctagcatcctatgcagcacctagggccagggatacaaagactaccctggcgtgaactccagcggctcacactgtccacagagacctttacaatgctcctattctgttcctctccactaatgggggaggagacgctcacgtttccttcccaaaggggaatcaactcacctatgtcttagggttactactgctaagacgaaacaccatgacaaaaagcaagttaggaaaaaaggggagggggaggcttatttggcttatactgccaatttcaattaaaaactatcttattttatataacaatccctgttccctgtcccttctgttctcccattccccatacaaactccccatgccccccccatccactcctcagggagggtgaggcctcccatggggggtcatcaaagtctgtcacatcatttggtacaggacctagaccctgtcccccccccctgtgtctaggctgagagagtatctctccataaggaaagggttccaaaaagccagatcatgcactagggataatcactggttccactgccagaggccctgtagactactgtccaagccccccaattgacacctgtgtttagtgggcctggtttggtcttatgcaggttccccagctgtcagtctggagtccatgagctcccacttgctcatgtcagctgtttctgtaggtttccccagcctggtcttgaccccatcactcctccctctctacaacaggattccagttcagctcagtgcttagctgtgggtatctgcttctgcttctatcagctactggatgaaggctccaggatggcatttaaggtagtcatcaatctcattataggggaaaggcatttaaggtagcctctcaaccattgcttagatttttagttggggtcagctttgtggattcctgggaaattccctagtgccaggtttctcgttaagcccataatggctccctctatcaaggtgtctctttccttgccctcctctgttcttcccccacctccaccttcctgatccctcatgttctcctccccctctcctcttctcccctcctctttctcttacctcccctcccctccccacatgctcacaatttgctcaggagatcttgcccctttccccttctccggggaccatgtatgtctctcttagggtcctccttgtttcctagcttctctggtggtgtggattgtaggctggttgtcctttgctctgtgtctaatatccacttatgagtgagtacataccatgtttgtctttctgtgtctgagatacctcactcagaatggtttcttctagttctattcatttgcctgtgaatttcaagatgtcattgttttcttttttaattttaccactgagtagtattatattgtgtaaatgtaccacattttttttattcattctttgggtgaggggcatctaggttgcttccaggttctagctattacaaataatgttgctgtgaacatagttgaacagatgtccttgtggtatgaatgtgcatcctttgggtatatgcctaagagtggaatttcagcctgctttcttatactacccaggaccaccagcatagagatatcaccacccacaatgggctgggcccttaccatcaatcattaattaagaaaataccatacagctagatcttatgaaggactttttatcaattgagattctttccgagcaagtaactccagcttttgtcaagctgacataaaattagtcaaaacaattgaccacttataaatttgtcgcataaacacatcactgttaaatcataactttgcctttcttgttcatgcccaagatcacatattaatatcaatatcacaatataaatcattttataaacataaacagtcccctagtctttatcaattcaaacactgctttttggtttttttgagacagggtttctctgtttagctttggagcctgtcctggcatttactctgtagaccatgctggcattgaactcacagagatccacatgcctctgtcttccaagttctgggattaaaggtgtgcagcaccaccgtccagccaacacgtttttaaaaaatcagtctccttttaaaaaatccaatgtctcttttaaaacctaaaatctctttaaacatttaatctctcaattttgggctcctgtaaaatcaaataaaagttactttcttacctcaagagagaagaaccagggcacagttacaaccaaatcaaagcaaaaccaaactccaaaagtgtaaaaactcaatatacaatcatctgggattcactcaccgtcttctgggctccttcaagggtttttggggcacttctccggctctgtcctctgcagcacacatcatttgtcttctaggctctggctggttccactctgctgctgctgcttttcttggtggtcgtcccatggaactgacatctccaaaacgctggggtcttctgttgcagctgggctgcactgtcaccagaagcctctcttggggctttcttcatggtgccaagtctcaacttctctgcatgaccccttcaatcctgggtcttcaactgctcctgaggctacactttcaccagtagcctctcctggtctctcatggtgccaaggactcagctgctcatccaggtccttcacgccctcaaaaccagtaccacctgggcaactcttacattacaaatgtaagaggtacatccttggctacctctggaagacagcttctgtttgatgaccctcaggaagcatttcccaaaggtttcacctcagtgatgctggtctcttcttaatcattgctaatttttcagctccagctgaccagtatggattgtcccagtaacaaaaggtttcacttcaatgattctggtcacttgataatcactagtgactcttcagccccagctgacaacacaccgaagaatcttcacacgaaagtcctggtagagtctttgcttccccctgaaacttctacaagccaggcctccatcgtctacactgctcttattcttaccttccaaactcctacagaatgagccaatgagctctcgatactcaatggcttttctaaccaaaagtttcgaggtccttccacaaccctccaaaaaacatggacaggtctgtcacagcaacacctcactagcctggtaccaacttgtcttagttagggttactattgctataatgaaacaccatgaccaaaagcaaggtggggagcagaaggtttatttgaagtatacgtccatatcatagtccatcattgaaggaagtcagagtaggaacttggagacaggagctggtgagtccatagaggggtgctgcttactggcttgctcttcatggcttcctccccctgctttcttatagaatgcaggtggtgctcatggatggccccacccacaatgggctgggccctcgcctatcgatcactaattaggataatgcctgacaggcttgcctacagccaggtcttatggaggcattttctcaactgaggttccctcctctcagataactctagtttttgtcaagttgacataaaattagccggcacaacctaccacaggcctaactagggatggggagagagtcttagctttggaggaaatgcaaagctgtaattaagttgtgtcaagcattttgatgttttaaatggaatcttatgcaagtatagaaaaagacacttaatagaacttgtaaatagaggcggaacttttttgtcccaactgtctggtcccaaacaaacacacaaatgcttatattaatgataaaagctcagccaatagttcaggcttgttactaactagctcttacacttaaattagcccatttctattaatctatgtattgccacatggctcatagctctacctgtcctctagcagtggctgactcaggtctttcctgactctgcctttattcctctctctatctccagtttggctttcctgcctagccttattctgctttgctataggccaattcagctttattatcaaccaatgagagtaatacatatttacagtgtacagaaggatcatcacacagcaagaactcaataagtcttttgaaaatggcacatgtaaaacaatgcccttgattaagacacagaaagttcctagtaacttagtaaccctcctcatacctgcttccagacccttccatccccaactataccaaaaacaaaaaaaacaaaaataacaaaacagtattgtgcattttgcctgtttctgttttgcacaaaaatggaatgttatcttatgcatacttctgtgtctaatttctatctttctacatgttaaatgagagccatccatgtgtctatacatccatgtagactatacttttgtttgtaggattctcttaggttgcctgcaccaatttattttaccattccactgttggtaggaatgtggttagtttgttatttaaacctgtggcctttaaacacatgaatacacggcatctggtggatctctgagcacaggtctgtctgttaaatactatgcaccctccagtgaagttgttgtgggttatagaaaaagtgtgtgtgtgtgattatgtgtattaaacattgcctaaaagttcctaaaagcatttgtagcattcacaattccaccagctataatgaaggttttaactattctagacctctgttctcatttcacatttctttttgtttttatttacttatttttactctgagttggatatgttagttactgaattgagattctatggtgtacagtatctttggggcttgcagtggcccaagggtatccactacaacctgagagcctttctgggtgtcacataaggatcaaaacatatctccctacagccaagggaaggaagacttctgtttcttccaggtgtttcatgatgaattcttggaccttctcatgtcagcctactggtaacattagggccttatcattaggaggaaaaaatactgtttataaattatgagtaaatatgtggcatgagggagaggatgtgcacatatgtggtgcccatggaggttggaagagttggaccccatggagccggagttgcagggagttgaaagccagccagcatgggtgctgggaacctaactccgtttctctacaagagcaatgttctctcctaaccactaaaccatcttttcaacactattatttattttaattttatttctgttggcatagttgttacagaaacacaggtaagagtttcttatgaacaaggaatgttttttattgtactctaatcctccctgtcctggtaaatgtaggatttcaatctatctggaaccctaattaatcttgacacttctctcagcgatctcaaaggtccgacttcagattgattacataagggactaaggaggttagtctgttagtctgcgcaagaaaaacagacaagagtgcaggatcctttattgtggtggtgaaagaagtcagaggagagaaagggaatccagttataggttcttggcatccttgttcatcttcatctccttactctgcaaaggagcacacacacagcacacacagcacacatagcacacacacacacacacacacatcacacacacacacaccacacacacacacacatcacacacacacatcacacacagacacacactcacacacagaacatacacaacacacacacacacacacacatcacacacacacatcacacagacacacactcacacacagaacatacacatcacacacacacacacatcacacacacacacatcacacacacagcacacacacacacacacatcacacacacacatcacacacacacacatcacacacatcacacacacacacatcacacacacacacacagacacacactcacacacagaacatacacatcacacacacacacacatcacacacatcacacacacacacagacacacacacacacagacacacactcacaacagaacatacacatcacacacacacacatcacacacatcacacacacacacatcacacaaacacacacacatcacacacacacagacacacacacacacagacacacacacacacagacacacacacacatcacacacacacacatcacacacatcacacacacacagacacacacacacagacacacacacacatcacacacacacacacagacacacacacacatcacacacacacatcacacatatcacacacatcacacacacacacacatcacacacacacacacagacacacacagacacacacacacaacacacacacacacacagaacatacacatcacacacacacacacacacacagcacatacacatctcaccacacatatacatcacacacatacaacacacacatatcacacacacacacacacacacacacacacacacaacacacacaaacacacacagagagagagagagagagagagagagagagagagagagagagagacaataccacttagtccctaagcactcctctaattccctgtccaaggaagacttctggcacacacctgcgacaccagccctcagaaagctgactaaggcaggaatgtctgaagcccaagaccaggtggggctgtaaagcaaggccttgtctccaaacataaaatgttaagaagatcccagttccatgtctgaggggctccattctaggctccccacatctccatttataagtgaggcctgcctgcaattgctggatgatgtaggccctgtgtggcctcaaaaggcaagcctagcccttgtgtggatttgccgtgttttcatccaggcagttgtttgcctgagaaagtgcagcgtgtcaggaagccaggtccctgcagaagccgttagggaatttttttcggcaaacatgtcattttctaattgggcctatttgctgccgcccttctgcctggctgtccctgagtgagagttataattatgtgcagaacagcagcattcctgatgcagacgcctcaatggcttccctgactcatgaaaatgagtgacagaccctcaaagtggagttttgagggagtttttcactgaaaagaaagctgcagtgatagccttaatcaacgctactgggtggtgagatgtaatttgttactcagttttttaatgccatattaaaagacaggagaaagaactaggaggcaagccccgtctgtctgaatggtgacatctacccacatctttcactgaaaccttcactttgaaaggtgtgtcagtatgggccaagaaggctcagtgacaagccctataacctgagtgtgatctccataatctatattgcaaaaggagagaactggctgctcaaagttgtcctccaaccttcatacatgtgttgcagcatgtgaacatacaaaccgacacacacaaaagtaaatctaaaaaaaaaatgtttaagtatctcaatatcggtgttgaatgccatgtcctccatgactctggaaacctggtagaagatgagagtgggagagtgtaagacactgtgcaactctgtcttctggacacgacatgagctttgtgtggttgaactcacagcatctgtaattagctgtccatcaacatttcggaggccgacagggtttacaagtccctgcccttcccctgaggatctacaggcttctgggagaggaaaacaggtgggactttgggtttgggtagagcaaagctggatacagttcacatgaaagagggtgctcttccgaagcacggttagagtaacaggtagaaacctgcatgagctggatcacccaggctctcccgaaaatagctgttagccattctgctggcagtgcagctgtgacactagctacaggctaggcccaggtgacaggtccccacgggtgagaagcagcagtggttgcatttggactccatcatttcagagatgaggaggctaggattccggaaagcgccttcctacaggacagtaaacaactagcagtaaaaggcgcatagatgaagttcaataccccggccatagactcccactgtcttactctatctctcctgcgcgaggcctctcacattccgtatttgctattaagtctctttgctgccaccaaggccctggcaggaataactggggaagggtttcttttggcccccagtttcaaaggctccttccatagttgcctgactatgtgcaggaccacgtggtggttgaaacacatagcagagaagaactccacagcatgtgtctggcagaaagcagagagcaaaatgagaagtgtcccgggtaaatcactcaccttttactaacccgctctctctcagaggtttacctccaccagctctgccccatatcttaagttctcatggcctctaaaaatagcaccatcatcgggagtccaagaatcattccaaaccatgagcttgtcaactctactgtgcaatgaccttaacctcttgaacctattgtctcatcaacaaagcaagggtaacaagaacagcaaacgaagacttatgagatgaataagtcagggaggaacagaaggtttagttcttatttgtactgggaaataccacatttatataaaccaaatgagaatgtaggaagaaaatagaggtctttttaaaaattatcctcatagctataattactggctataagcctgtaaaatatccactgtccccagccaccatttaatagcaggactttgacgacagttggcacaaggcttggatgggaccagtgtaagaccccccagaagctcaggcctccaggatctcagcccaggaccgtggtcaccccaatcaccaggcagagtcgaaagcttgatgcaaactgcatgaggctttattgtagttgtttagtgagctaaccccatgttagctcgggtctttcatccacccgccatggcggatggctagaaagacagctcaaagcgtctgcatagagatcttatagggcagcgtaaggggagtgtctaggggtacgcacaggcctggagggcttgccctgtgttgattggtcaactggttgttatggcccataggccctcccagggtggttgctatgctctgtgcgtcattgctgtgcacttgtccgtaaagtacacccagagccgtaaagcatagcaccaccagctaacttctgattggttccttgccatgaggcagggatctgactttctagtgactaggacaaggtcaggctaacacgtgttcggctgttatggctgctgaaatggggagctggtcccttcaccagttctatgatccgtggagcttctccttcagccactggtcactttgtctcatcatccctcacccctttctctggctacttcacttttcttgttaaattgtttaataatctctagagaccccagtgaggaatttcaatggatgtatgcaatatataatggtcagatgagagaaatgaacttattcatcacctcatctgtctattatttgctgtatttagaaacattttaaatccactctactggctgttttgaaaaaacaattaattttcattgtctgtagttactctgctgtgctgtagaatattagaagtcattgctcctgtctttgttcatctttgcacacattggacatcttctgcatcctctcaactcccctgtccctgtgctagactctgctgaccaatattctatgtagagggcctgaggtcctcataatttagcactagagaaacccaaataaattatgcctgtttccacctggcaatctcgggatggacgtagttaataacctggtgatctttatctcccaaactagtggttctcaaccttcctcatgctatgaccctctagtatagttccttgtgttgtggtgacccccaaccataagattattttcgttgctacttcataactgtaattttcctactattatgaatcatgatgtaaatatctgtgttttccagtggtcttaggtggccccttgaaagggtcatttggctcccaggttgagagccactgctcctgactatggtttatatcccagactcttcttggactccctgaatgttgcttctcagtcaataggacctattcttatgcccatatactttgcaaaggagttttaatgtagtcatgccttatctttattctttattatgataagtgtcataaggaaacttatccccaaagttttactgtgtttaaatatgtcaaaaataaacttctcggggtcagactctagaagtttgaaccaacaccagcaaaccaagttgtgccgaaccagacttccttcttccctcacgtggtttgttactcagctgaccatggcatttgcagggacccccacaattctgctctctacttctatgaggttggctttgcttttctgtgcttgccctatttcacttaacacaacatactccaattccatctatggtatttcaaatgataacatttcattcttcaatcactgaatgacagtataacagtagtataaactacagcatttatccattcagccatcagtcaatacctactttaaaaaaaaacaaaactatgaaaagcttcatgaatgtgaatgtcacctgtataagttagctttctgttagtacaatgaagtttccatgaggcaattagcttagaaagagaaaagggttgtcgagctcatgttcttatagttccactacaatattaggtggcccattgcctcgtgcctatggtgagggaaccagatagtaatgacaggagtgtatgttgaaactaacagctggcacagcagactggggagaagagtaatgtttggaaactgtggtcccataatcctcttcaggacatgcccccagtgacctaacttactttcatttagcctcaactcttgaaggctccaccaaccccccccccaaaagctccatcagagagaccaaacctttaacatatggatcttgggagacactctctgaaacacttatctgaaatgtttaggtggcagccataccgttttcctctactaacccgctgttctgccaaagctagtaccacactgtggtgttccaagtccctcagacacactctggacctttggctccagcctgagacaaaacccattttctcagagagaaccctgagctaagcctcctgccagcttcatcatccaaggaccacactctgccttcgaagggctgcagacagcgttcacaccacagccagacagctagtaggccaagttcaagggctactcggctgccaagagcatttttcccatagaagtgtcagaagcagacaaagctgcctggggcccatgtaacattttcaccatacgctgttttgaaccatccctgttcctcgtggatccttcacaacacttgtctttgtaaacagacctgatgataaagacgcgagaagtcctggcgtgcagaggctgtcacaaatctcacatactagcaatttcatcttgtctcctgggcggcgcagggtggcacagaagttgcagctgagtgctgagttactagacatctgtcagcatctgtgctgtgcaaacaggcggtcttctctgctggacaggctcgcctgctttcagtagagacataagagtgtcagaaaacacataaaaggactgggtcatgtgtgctctgaatttctcatcttcaaccttctcagaagtgaggcagagactaggcatgcataatctcagattaaaaaaagaaaactgcacattgtaaataaagaagaccaggcaaataaagattaagataaaatgcacaagataaccagacatggccgatggtggacggattggcaaccgaacccagacacaaaaactttgacctatggtttgcccttcctgcagagttccaggaccagcgcctagcagaactgtcatcacagatacctaagagacttcatccagcaactgatgggagcagatgcagagtcccacagacaaacactaggctgagcttggagagtcctgaagacaagggggaggcaggatgtgaggagcaagagacgtcagggacaccaagagaacatgacttacagaatcaattgactgggactcataggggctcgaagataacagggaagctgtagggatctgacctgggtcccctgataacatgttatggctgggtagcttggtgttcttacgggattcctaacagtgagagagggggtggtcactgactcttttaactacttacgggactcttttcatcctactgggctgccttgtccagccttgatgtgatgctgtgtgcctgatcttactgtagcaggctataccatgtttggctgatgtccctgggaggcctgctcttttctgagggtatgtagatctcggggagagaggtaatgggggaaaggagatggggtgtggggaggaagggaagggaaactgtggtagggaaactgtggtagggatgtaatatgtgaaggaataataaaaaataattttaaaatgcacaagatactatctttaagtggtgtaataagggtgggaggtggctcagtgggtaaagtgtttgccttacaagcatgaggacctgagttcaatcctcaaaacctacattaaaaattatacagataagtatagtggcaggcactggtagtgtctgcattgggaggcagagacaagtagacccttagggtttgctggccaccagcctaacctattcagcaagatacagaccaccaagagacccagtctcaaagaactagatgggtagcatcaaggagtgatagccaaggctgtcctggagactcacatgcacacgctcatacaagcacatctctacatgtgaacacacacacacacacacaagcagagatggggtgataaacataattacatatttgtctattttctaacttgcctctgatggttattgtttttctcataagaaaaaaagactcaataaatggaaactgtggcaaaaagaagcatccccaagcttgctgagaggccataacaaggcagagagtggctcgtgctgggattggtacattttctcccagttctgagggtacaagtttgacactagacattacaggtgggctggagcatggagcctcatgggagtctgcccattttcatgtgcgagcactggacctgggacagtggcactgcctctccacattagcagggggtctcagaatgcactctgccatgctctatggtcaacaagggggacaagtccctgaaacccctcgggatggctaggttttctcactgcctctaaatgcagtggtgtagccatgccaggcaccatcacacaaggcttctgtgccgggaattgggagacagctcagtgcatgtcactctgttcaagatcttattggatccaaagggaacatgacgccaggacagtactcagtgcgcacgtgttcatgagcaccgttctcatcacagactccttcctacaaagggaaactgctgctgattccccaataaggacacaccaggaagacaccaagcactgaaactcaagagtcacaaggcctccatcagagcgctgaacaataagcccttttactcaagccaaaagttttaccacttgtttgcgtggaaacagcaaaactatgcaacatgtcccttggcacaaaatgccctgtttaccatgcaagatacagtgctattggagtatacaataccccattgttgagaaacagaatctgagcaaaattattagggaaggaagcaagtatctactggctagattttgcctgatgtgagaataaagaaatatagttcatctaattcctggcatcttggcagtcaacttttagtctattgtttgaaattgtcatacacgtttataatgtgtttttatcatacacacctgccttgcccctcccacagccagctcccctcccagatcctcccaacacatcttcctcttaagttcatatcctggtttggtttggtttgttttttataacacacctatgggtgtggagcatggacaactgaccagtggccacacactcccatagagaagtgactcttgctctccccagcagccaccaactgcaaccagttcctcacctaagtgtgggcctcttaagcctctcccctattcatgctaaaacattgactggcttgatcttgagtggatattgtgcgggtagtcacatgtgcacagcagccatgtcatacccaggagacagaactttccgtctctcttctctagttggctcttacttttttccaccctgtcctctgcaagactccatgagtcttacagggtgttggggttagggtgacataggtgtcccacttgtggctgagctctcagcctactctcagcactccaatcctattttgggtcaaattaatgtggaatttgaaattttacaaacacaacaacagtaaaagttttctgaaagtacaatcaccaaaacttaattcaaaattaataaatctgagttgtttctaatggactcactattacactgtgcagcttccccacagccagggttcagagcatcacacagaatgaccatccagtcatgaaataccaacaaacactgcctgaaacacattggctccaactctgaactatttccatcttgtgaattgcagtggttttactttacctgcaaaactttctgctggtatacaaacatgctgttttaattatggagtgcaaagacttaacgtttccccacccagaaccacacgaaactttctcaggcacaagaggaggatgtacacgcaaacagtctaagaagccactgggctaaattcagaggaatgaagttgttctaagttaatacttgatctcaagattaaaaaaaaaaaaagactggaaagaaataagtaagggttctggggccagatctggaaaaccataaaatgaaatggctgtgcttgtgttctttgtcaatagagacaaaacccctgtatctcagtatctcatccaacctgaagggaatttagccaccgagcttacaaacaacatcatgactagctgaaaagtgggttccccaggacatagttttggagatttcactaaactctgatctattgctctccagtgtagtcttccagtgacatcactggctttggagaagggggaggggaatgttcaatgccatcaatgactttagagaaaaggggttgctttgccaaaggtcagcctcacctctttatctgaccatgtccactaagaattcagataaatctgccattgacttgggtcactgacgggtcagagagcagtagctgcctaaccagattaggcagaaatttgcaaccacattagtcatcatgcaagcttctctgtctaatttcaaagtctcttaccacttgggaaattcttcaaagaggcggaaaaactggcagtgcattgtttgtcctcgggggcatctttattaaattataaatggatgcaatttttccacatggaaaccagaacagagggagctatgttgtactgtttgtctctctgtgcaaaccttgctttcagttgtcttgatcatagaaaaatcaccccactttccttcagcatcacaccttccagagagcaccacacacaaaaaaaagcaaaggtaactcctcccccatcacgtgaaatgtaaatcaataggagcaaatgattgagtatccttacatcatgtagcccctgtctagatcacatggagccaacttgatttccttctttgttttataatataactgcatatcgacattccctgtagtcccattaggagtgggtctactagcctccaacaatctccttctcaggccagggtgggggcttccacagaccctttccaactctaatgtttaccactctcctcccagcacagctgacatcagaatatgcttgtctttggacacttgagatcaacatttcagacttctaagagatcatggcaaaggcaacaaacaataaagctgctcacattcattagctatgatgaggactgagttgtatatcacgactcatgacaatctgttagctctggaagtatataaactagattatgttagttactgttattctacagagggaggaactgaactttaaaagaaggactacgtataagcttgtcagatttgaactgagtattggtggtccctcccccaccccttatgatacccagcacaaatgtcacattgccttggaattaagatatggtccctgtgagaaagatgttattatataccaggacatagaagcatgtggctttcaggcccaactgggtttagtttgtttatcacaagtccacatttaaaagccactgttcccagagtgtttaccatgttcttaaacccacaaagctagatgtctttaataatataccatctcctccaacttcttactttgaaaataacataattttacttcagatctagaaactgaagttaaaagacttgcttcaggccatttatctgaagactcaattcagaaattgacctcatgctacctcttcataatcagtgactgcatgtgaacggattcttttgcttgatgcccacagccctgcattagtgtatatgctgggaatgttcactcagatagccagactccctgtcttcattcctgtaaacagcatatctgtgtggagtcacagacctgggtacaaaagagtggtctgtattatgaggttcctcttttaactggttggtgttactacccagcccacactgagacaagtccctagtcttataaataatacatgcaatccaagtgatccagtttgtataaacccaactctttcaagcccttacaaagaaccatggagcaatgaaaagaatgtggactttaaagtcacataagcccagtactgtaactggcttttgtctgttttgttataatggcaaatgtttaattcttctatcgtgggtacagaagctctgctttgcaactcttgttcatcaccatggtatgaatacccccaacatgactcatttcacaattccaacatgctgcttttgtgtatagagttggaaagggacaatgacagttgttggatcccaaatgcaagccattgcgagcacaccactgctggtaggtcctaatagaaccttggcttgaaaaccctcaggacaagatttagggtgagctactactttgccccacttctgtaaagcaaaggacatattaacacatgcaaggagagtatggccagaaggaggagagcaaacaccaactctccagccttcctggggagctacgcatacagaaccttctgacaaagaggggtaaaggaacactcggcaggcgcaatctatgtcttagactccatcaggaggactccagtaaggtggattggctatgtggtcaaggcaggagtagaaacagatcccatcctgcaatcctattttaagcccaaagctttatcccagatacattcactctccctcaatgccatgaagaaatattttgtacctgttgaagcattccttcctaaagaaaggaaggagggtgagaggctccaggaactcacaagtctacaagattcaggaagcccataaaatttacaagatcctcaagtcctctttccaaaaatcagcaaacaattgctaggaaggttagaagcttagggagactccagcaacacagcttccaggagccatcaccagtgctgagatggttttttgattttgcagcagcctgagtcacttctgtcgataacccctatactctcgctgtttactaagatgaacctggatgtgttgtgaaataccactttaactatgaaaaggtgttgcgtttgtttacgctgcatttgtttaatatgtaatatgctgcttcatcttgcctgccctaggatctaataaaaagctgaacagccaatagctaggcagtagagggataggtggggctgacaggcagagagaataagtaagaggaggaatcaaggctcaagagagaatgagggagagagaaggagatgcctggggccagacagacagacagacacagaggcaacaggaaagtaggacatacagaatgaaagaaaggtaaaaaggctctgaggcaaaatgtagatgaagaggaataggctggtgtgcattataagggctggggaacaagcctaaactaaggccgagcatccataactaataataaatctccatgtcatttagttgtttgtttgcttgtttgttttgagatagggtctcttgcatcctctgactggcctcagacatgccgtgtagctaagaatgagctcctgagctcctgcctccacttcccaagtagtaggaatcacaggtcaggtgtgtaccacaggaccagtagatccagcactgggggttgacaatcaataataacaacaacaatggcgctgccaattgcttctcactgacacagatccccaaagggcattttttgtgcgctacttagactattatgagtccataatgttttccaaaataccatagaactgctttgtgtgtgtgtgtgtgtgtgtgtgtgtgtgtgtgtgtgtgtgtgtgtgtgtgcactgtatgtgtgtacatgtgtatgtgtgtgcatgttatgaagaaaagtcctgagcccctcaaaattagatgaatatttccccacccaagacagactttcaacaaatgctcttcttcttcaacagaggtctgtctgaacacagaaaagagcctcccttgcttccaaggtatacaggacaaggcaaacctccttcctcagggattttcttcttccactcctactctaggcttcttatgaaccctgtgccaggtatagtcaggaactgtgtctacagctacagactttcatcatggataatgggcccttggggacaacaggtgataggcaaaacgctcatactcagggcaagggctcagttttatattgagtcacagtagtcttggacattcactggacgatctcagcttcttgtcttccaggtgtgtgggttgcacttccagacttcctaagatttgatggaacaacgtgacctcatccaaccaatggcatatgtacagaaacatcatgtgatcatgctaagtcggaccatttcattgatgtaatcagactcttaggagaactttttgtcttggccacaaagactaggaaggctttaggtagcatcttctctgtcaatcagagtatgcaagaaaaataagatagaacaaaacccagagttcaactacattaggttcataataggagctggaagcacatcttagcatttcaaagacattatatctcttgagttgtttccacgacctgactggtatatgagacaagcgattgaaggtcgagggtgggaatggggagaagggatttgtttctaaagcagagatgtgatgtgtgccatcttcagccagaaagggtcatgtgtctattgctgagctgatgccctgagcccagctccagggaggatgctgagggatgctgccttcttagagccagtgttacgacatttaaatgtcatgcatcctattctatcatataaacaaaatgctgtcgcagtttagaaaagactgcagttggtcacaaaaaattcaagaatggctactgttagagactgggtttgagtagacagccactggcatgtaggatgctttcctgtcaatgctcccaagatcagcacctaacaggaggagggagaccatatttggctgaagggaaatttgggctatgatgcagccacaatgaaggtcttaactcaccctctggtgactgatggaaccaaaatgacctagttaggcttaactgggtgagggagaatcaggcatgagatgtgggtgaccctaggaagaagaaacagccttgagcgcagagttctctttagcctctagaaatcactgaaagtggggcttgtctgctacgttccagtgatcagcactcccctaaaccaagggggattcacatacctaggtcacaaaagggaaatgaaagcacccgacatccactgtgcccaggaaagcaagaagaaggcacatcacaaacacatggggtgggggaggctcaagacgcacagagcaatcgtctacccagcgccttgcatgtagagcagagacaaagtggtcctatgagtgggaggggggaaacccagaatccaaagaggtatttatggcttaagtaaccaattgggtgagcatgatgttataaggcaaaccaagataaagtattcatgaggtcatggctccactccaagctagaaacgagagcccaagtcatctgagttaatggaaggacaagaatggactcaggtgattttaaacagaaaggaaagcagacaaggagaactaaactggacctcagataccacaaagttagcgcagggacttaatgaattgcacactgtatccgcctgatgatggttcaaaggatgagtgaaagattctatggatttgactactaatactcgtaaaaaacttgggggagattataagacacagggcaggatcctatatctcactctactgtaatcatcaactcttacacaaccatggttcctcaatatgagcatctctgtggagcaccaaactgcaaaactgcccactattttggtgtgcttcctaaatatttccatgtcttgaaggaaggatgtgaagttttatattattattaaggagagattttcaagtggcagttattttattaaaagggggaaaagcgtgaagaggttaaattgcagtggagtttttgaaagcaactggaagtaatcagtgtgaatttgcgacctgtttgtgaatgttcttagagaatggagggaggacccgcgctttgcagtgtcccgctgtgacctggcaatcttaatagaagtggtttggagagacgccttgtaggaactaactgatcacaagctgaaggagcaaaagaatggacggttgttttccgtgtctttgaaatagtcagctgtggtccctaaggaatacgtgaacagaaatacagaccaaaaatttcttagctgctctgactgatcttcggatggaaacggaaggtgatttgcaagcacagccccgcatgctgccatggtgttcttggcaaggctgttcacattaattctccagactaaaggcgaggccacacatttctgtttctttcttcaggattgcagaaacttcaatcatgatgccttgcctcctcatccaagtttttaacagcattagctgattaaactctacgttgcctctctggaggaggggaacttaggacaccctcacaagaaggcagacatgtctattcaccagagaagtgtgaggacacagcctatccaaagctatccgtgctcaacagaacctccaatgagctcagctcggaaagacgtggctctcacgattgttgggaactggagtgcagctcgtccccaggttgaagtggtatgatggcaatgaccttcaaaaaacctccatgtgagtcctttgtgagagagggaaggagggagggagggagggagggagggaggagaggagggagggggaggagggagggagggagggagggaaggaagggggaaaaaagtttgtcactcaaggctccttatcagtcacagtgcacaagatacaaagctccaaacatactccctgcattagcaaagataccctgcttagtgttcagagtctattttggcgactgtattcatcaccatcatcttccaatggatttttctttacatttttactcctacatttctacaatcctggttattaaaccattttaagcctcaccccttgcaatttggggattgaacctgaagaggtaggttgtgctttatttttaagttctcacacagtgaatctaacaaaaagcccgattcagagactccattcttgggaagtatcattcaaattcccacctttgccatcagctcacctttcttgatgcattttctcccatggtatcttaattgatgctcagtcaaatgctctgagacaagcagagcacagaaagcccatcctcacctgcaggcaagggggttcacaagtcttcagcttttctgacatacacagacctggtactaggctcactctttgaggccatgttcagcttctgtgcagaatgtctggaagagacagtccactctggtaaatgtgcatctgagctccactctgcacaagtgtgtttggacatgccctcctcttcaccctcccattcttctcatggccaaagagcacacacaaacatttccccaggaaaagtctcccaatcatttatttttttgttgtttatgagacatggtagtctcatgatgtctaggctggtctgggcctcacagctgatgatgaccttaaacttgtgagtctcttaactctacctccagggtgatagcattccaggtgtgcatggccacactcagtttccagggtgctgaggatggaaccaagagcttcatgatgctaggcataagccctcagaaagccacatccccagtgactttcttcctgagtcccagtctctgcctccagcccctctttctccaacacaatgaagccttttgagagttgtgtttctggtagtcctttctttagtctctttttgtctgtctcatttggttccatattttcttaagtgagaaattcactaagccaccatagagaaactgagacagcctgtggtcatccccagcccatcacagaggcgtcaagtctgtttaattaaggattggctctggggacccaaaggcttagagaggtttcagcggagaacagtgatattgttgaaaaccaagaataattatttggagcaaaaaccaattccttgcatctgtctgaacccctgttgatttacaaacataaggtaattctcctcaactgacttaattcctgttcccattcagttcccccgtgcttttcaactaatgtcttaattcccctctgtgctctctgcactaccaaatcaaagcaaaatttatctttctttcatttgccaaagccaagcaaatttggaaggggaaaattactaataaaggacaaaggattttaaagaaaatgcattgtttcatttcagtgacttggaacagactacaaagacacttaatcactatattaaatcaaaggaatgtaaatcgcattattcacattcataaattgctgacaacatgtggcttttgaaaagctggggatggaaggcagagggagggacagagtctggaaatgagtcatcctgggagttggggttagaagctatttctctgatttcattctcttttctcacaaggcagccattttacagccgagtttcagaccagctcctagctcttatcaccaaggtctgggatgactgagtcccttgtagggggttggccttggtcactctaattgtagacttgaagcactgtgtcaccctgatggcaaaatcagataggcatgtttggcaattatccattgttcaaaaagctcaatgaatctattgttttgttgccattgtcaatttcacattaattttttgaggcaggctcttgggtagcccaggctggccttcaactcacaaagcatcagcagctcataatcttgtctctgctttccatgtgttgagactacagcaggtgctgttgtgaccagagatttatggatgttggataagagggaaatgtgtgtccccactgaatcacaaaggtcccaaggtagggggctggggtagaggacaaggggacttaatgagaaagtaatgactggccgtgaaaccacctagaggactgcttataccgaaacactggctttcatcccatcacaactggcctctgcaccctattcaggacacagcctccctgaactgttagccctgagcaatcctggagcacatatttctccctctagctccctccctatcccaaagcatggcctgtgtctcccaggataaggtaagctgtgatgctttcctcccccagagaggaacatgagctcttagctctagcccaatgggttttttccaactgctacctagccctgctgccaatcctcatcctagagtctgttctcgtcctgtcatctgtaactgctcaacaagacttgcaacacagagatcctctgttttctagggtttgcattgaacacactcgcttgccacccggtccatgtgtgcagagactgatttttcaggatcctgagccagctgcctgtggtcttgaaatcttcctcctcgctgctaaggacagaaagggagcatattctctccacttcagttttctaatctgtgaaatggaaatgatgataataccttccttgctttgtagattttatgtaaggttaaaatggaaacaagcatgcaaagcctttggccacttgctagtaaaaaaatcacttgagattcctggttctcacaccagttgggttctagaaaattaccaggaaacctgaattcataaattctgaaccactgctgcgggagaaatccagagcagcttgctatgggtctctggcaacagtaatttcaccaacagatcaatatataaccttttatgtgtgtttctgcttacaggaatcttgcttaatgtatgctgttgattcataaacattgaactcaaggccaaatgtgcagtaattcccacctaagcggagcttaactcagttcatagtttctccaaaatgcccacactggccgttttcattagcacatcagcatgacacacgggccctatttcaacaagaaacttgccaacagaaaggccaaaaatgcaaaaagaaatgaaaaagatcctaaatgattcacagaaataaaaacacaatgtttccgtgttagatccctgggaattcccacgtaagaggttcaaatgttaccactctgcccaaacccatgaatgatggagaaagcacagtgaatattgattctcaaatcaactcatacatttagcatgtaggtgagtttgcaaatataaaacctgtgaagcatgagggtcagctgcattgtaactcatcactcaatggcatacacaaagttctcctactttatagaagataaagagcccagtgagataccaggtgatagaatgaggtgacacagatggactcttggaatcccaccccacacggcagggacagctttgtcacccttagcaacatgaaggtgccctgcatctaaaggctacactttctatgtatttctcacaactatttctgtaaaccatagagctcagtgtatagaaaacattcaaccatcattgtgggcatcaccctttccccttctctctactgaaatacactgaaaacctgctcataaaatagaaatggactctgccttacagaatgagtgagtagattacactgatgcagagtgcttacctaccacatgttaagaccctgagggtgagtccccagcacagcaaaagaacacagtaaacaaaatgttatctctctgaccgtggctttttttttttttaattatctgaaaaatcatgaaaagccctgtgaagggcgtggtcattacacccacataacagtataatctttttccaattaacctcgagattccagatagacatgaagcactattgaatttcctgctgtagaaacatctctagagtgtggagggtgttggtcaaaggacaataaacttcagttgcatagaaggtgtaagttcacaagaccaattgcatgccatgctaagagagtaagttttaattgttcttactgtatttacaaaaataataataggatgaggtagcacttagactaagtggtttaacttagctgttctactatctgtgtgtacatatatatatacaagcataatttgatatatatcatgaatataaaaattttatttgtaaactaaaaagcagagaaagaaacagagaaagagagagagagagagagagagagagagagagagagagagagagagacccaggagactttagcaaattcctaataattaagctataattaagttatcacaggcatagtaaacattacaaattctacacattcatgagactttagggcaagcttaaacttttaaaatggatacataaaaattaacatgctgggactagaggatgcttcagtcaataaagtgcttgtggcataggcaggggaacctgagtttgagcctctggaatccgtgtgtgtgtgtgtgtgtgtgtgtgtgcgcgcgcgcgcgcgcgttgcgtgtgcgtgtgcgtgtgcgtgtgcgtgtgcgtgtgcgttgcgtagcgacaaagggatctgtactttcattgtcaccaaatagaagaaggtagatgagataagagctcctacctcaacaggggagaaatgaaaacacatgggagaggccatgttgaaagagacaaatgcttaatgctgctttttgtctctatcctgacaccacattttctaaagatcaacaatgatctgaagtatgcatcatttatgatggaggtaaaaaactagattcaaccagaaaagaaagtgagtcaagtgtgcttttggaaatgatgtgtacacacagctctaaatgggatgtctccatcaaactccatcaaagtcctctcttcagagctcagagaaccccaggaagaggaggaagaaagagcgtaagagccaggagggggtggaggacaccaggacacaaggctctctacgtcagctgagcaaggctcacatgaactcacagagactgaagccgcaagcacggggcctgcgtgggtctgcatcacgtcctctgtgcatatattacagctttcagttaagtatttttagtactcctgagtgagtgaataagtgggtatctgaatcttgtgctttctcttgggctcttttctgtctgttggttggtttgccaacttttatgggatggtttttgctttatcttattatattttattttatgtattgttgttatctcttagaagcctgttcatctctaatgagggacagaaagggaatggatcctgatggtggaagagatggggagcacctgggaggagtagagggatgggagactgtaatcagggtctattgtatgagaaaagaatctattttcaataaagggcagggagaaagaaagaaaatgctgtgttcaaatcagcaaaggacaggggacacatttcatggcgggctgacagcttctaaactgacacatctataaaacactgagaagatgattctatgaaatagaatccattaatgatatgcctgatgtatggtatttttgcaggttcacctttacccctttcctttcttgacaatatgtgagttgagaagttaggactggatgaacgagaagggtaaaagctgataaaggcaccagtgcagcaagcttgaagacccaagtgccaggccccaaatccagagagagagagagagagggaaccctcaaaagttctctgacttccacacatgtaacagggtacatattcacccatagttacacacacctcatgcatatgcatgtacagacacacacacacacacacacacacacacacacacacacacacacacacacacctcatgcatttgcatgtataatcccacaaacattttttaagccacctagtaccatttcaactgcagttcccataatctaagttaactctgtctgtctgactctttaacattgctcatgactcttgtttatacagcccgccagaagctctcttcccaccttgaatttcagcttgtgtggtgagtcctggcaggagtcctcccgtccctgatctctgaccgccctctgctttgagtgcggccctcaaatctccctagaagggagagtcaatctccaaactcatgtgccactcttacttggtgatcaggatttagaagtaattgggaccaggtggggtcttgtcccataactcagtgggatcagcggttctttagaaggcgaccagagctggctcacttactctgcctccctacgtgatgtcgtctgccgctttgtgattctacagaagactctcaccagcagaatcatgagccaaagcgacttcagctcttcataaattatctactctctgctcttttgttacagtaacaaaagattgatacccttgataatctgatcaaagttcttatctttcacctttggtgtggaatctaaccattctggcctcccttcagcaagaattctgttcaattgtttttaaaagcaataatctcccgtgcttgggtctcaataacattccacccaccacacccatgctccatcactgtgcccttcaggtggaaatccctgtccttgcgggcagaactgagttcatttttgcccatgcatctcctccccttattatcaattctgcttcccaaatcaaaatgttgttgggtttttttgttttgttttgttttgttttgtttgtttttacttcacttagcttatatcaaagcttgttgtctttgacaacacgctgtgtggtttagcatttgcctctgtcctctgtatgttctacaaagttaggtctaagaaaattcatcagacttggtgtaagtggtgtgcatgttttcactaggagccatgctatgtgtcttcatttcctgatgttactaatcgtttatactgaatgtctgtatctcttaatggtgatactctagtcctgtcattattttcctcactcgttaattaagatgccactgtgatgaaatcataacgaaacacttcccgtctacgctacatccacccaatactacatttcacataggaaaattattaaaagtgtctgatgtttactttcctcagttttgaaagcaataaacttatcttctacaatccatcaaaaatgaaaaaaatagttatcgttatgagttcatgaacttaaacacatcagtaagttttagttgaacaaaatcactattcttgctatggttcaagtgttgcccttgtgtctagtgaaagcttagtgtgaggggaaatgagggaaggcgtattcgccttgtggtttggaaggtcccagttcgtcatcactaatcctttgcctctggttctgagatggagcgtccatcatagcagaggggtgtggcagctaggaaatacacacagtgagcaaggaagtgtgtccttgcaggacacacccctgtcactccttcggttggccctgatggcactctgagctggcagtcaagcctttatgcttggcctttggggaatcacagcttctcctaagtgcttttcacatgtacttcacagctttaacagctccccagatctctgggaaaggtgtttgggtttcatcttccacacttcttgcaccagaacaggagtcttcaagggtctctgacttctgtccagaccatcgtcattcactaagggagtttgtggcattaggttaggcttcctgccccagcctctgcagtggaaagagctaatagcagatagttacacttacatttttagaaatagtgttccatcaacccgtactcttcttggttgcatctgcttcttctttgctccaggtcaagactcctggtttttaaggctgtacgggagacagaatgaaatagtctatgatgactcacacgaacacctcatactgaatgctcaacagtatcaagaaaattattctagcccaaaataattagaattctgtatttgctttcaccagtatgcctcagtttataataggctatattttaagtactgcatattgtgttgtctctcagtgtaaactctgtgagtaaatttttaatggtcatcgccagccaattcagtaatatctttctagatattgtttgcatctaagttgtaaggtaagaatgatacacaggggctggagagatggctcagtggtcaaaaacaccagctgctcttccagagttcagttctcagcacccctgtcaggaggtttgcaaccacctttaacaccagctccaagggatctgacaccactttctggcctccacagacacctgtacacacatggcatatacttatatagatacatatattaaaaataatattttaaaaaagaacaacataccaagtctttgcctggtgataacatatttttctattttgtcattgataatgagttttaattgttacaaaatatttggttcatatttttcttcttcaatggttttcaatgaatgttattttattttgtgtcaaggtgcttgccggtccaaattgatattctccactataccacatatttccagtaagctctctttataaaaagtactatttggtattattgtgtgtgtggttcgcatacagatgcatgcagaagtcgggggcaggtttgggggagcttaggaagtcagcaactcactttgccacgggtcccagggactgcactcaggtcatcagacttgcacaacaaggagctctacctgctgagccttctcaccagtcacagtgtttctaaagtcttttaaacgtcttttctaacctcgggaaagctttcttcactcccgtcttaatattgactctaatctcttgttgcacttttcctttccaaagcctgaacctagaccatcttctgcacatccccctttccacagttgcccatattgttagtgttgctgatacatttttaccatccccagcctgcacgtctctgcagatgccatcatctgtctttcttctcttgcccttcttagccttcttgatgagcactgagttacaacagaacctgggctatgacagcaaagatctggggggacatgagatctggttccagatgcccaccagctagtcagcaatgggcccactggctttgaagctgaaagttaaatccccccccaaagaaatctagagtatctagaaccaaacccaagaagtattgatgttctctctctctctctctctctctctctctctctctctctctctctctctgtgtgtgtgtgtgtgtgtgtgtgtgtgtgtgtgtgtgtgtgtgtgtctcctctccctccttccccccctgtgttatatccattcacatttgaatctaacacaccagagaacatgaccaagtaggttctgatgaaacctcaaacatctcaaacatcctgactgctttgaaggatgctcaggtttcatctttggaacccttgaagatctacatgagttttgttatttctttcttctttctgtcatgtgacctggtatatgaacacagaacagaaatccaaagactcattacggactgctacaacaactgtggacaacgtatctccctacaaaccctcaaagacaagtattgtggaaactactcagtgagtcacaaatcactcctggaaccatggtttatgcaagaggcaaggagggaaggtgagttggcaaaaggcgccctggagtgcactgtggtgggcacttgtcagctatatgggattcttgccacgtctaatccattatggagactgcagcaacagcagccaggctcttcagttatcaaccacaagcaataaatgagatggaaaggaaatctataaagcaaaaagacatttaaagaggcatatcagccagggagacagatggggccttttgggagaaccaattcaaataaaccaattaaggcatatttaaaagatagctagtgggagatgaacaatgaatggatatttaattactttaaggaataatttgtttagatgtgctgatggtaccatggccatgcttccttttaaatgtgtgtatgtggtgtggtgagtgtgagtgcatgcctgtgtgtgtgtgtgtgtgtgtgtgtgtgtgtgtgtgtgtgtgtgtatctgtatatgtctgtgagtccatgtgtgaatgtggaggccagaggaggctattaagtggtctcctctatcactctctaccttaattttctggaccataatcagcttgcctggctggccaactagctcctagaatctgtctgtctccaccctccaatgctggggttatgggcaaactcagacatgcctgactttcacataggtgatgaggacttgagctcaagtccttatgctcacttgtgtggcaaatactctaagccacaaagccatctcactagccacactttttgaaatagtcttcattttctagagctatatcttgaaataatttcagaatcaataatgggagttttggatttacttttagataagctatctggaagagagtgttaggaaatgtgtctgaaagacttctttctataagctgataaccactgggatggggggccacactaatcactattcttctaagtatttcattatttcccacagtgaaaaattaaaaatgaaatatataacctaacatatatttaaagaaactacctggaagaatacccttgaaggtaacatgtgtattcattcaatgggtattctagaggatgaggctgaggtagataaaaacttgggcatcaacaaaactccacacataacatccagtatcccttggtatgctaaataatacatggatctctcagaggctagttctaaaagcaattagtgaagcagttttaatccctcttagatcctatagagatattttttataaaaaatagaaagtcaccatccagtgattttaactagaatttgataaaagaaattggaatgcatttattagcaacatacaaagtaaggcagttcaaagcaacactatctgtgctgctgaaaaaaattaaaatggtagaccagaaagtaataaaaattaggaagcaaggtgactatagataaaaagttgagcatagaattggaaagaagatgtacccctgtgcacatctgttgtggagaagcaaccctgagcatagccagccctcagtaggaagggacagtgcaccttactttacaccatctaagcctgggtctccaattctgccacatacaccaaattatctgcagggtcaggcatagagatttacgtaagcaagcgtgctttgtcaactgtgaagccaacactttccatcaactaaagggactgcagttcctggccgaactgtaagatgagtaaccctgactctagggctagagctcaaggcccttgtagttaaaggagagcatgatgcaactcctggcagcaaggcttctttgccgaattcctaaggctactttaaactgagggctcagcaactttattcagcctcatctcggggccaagaagaaaccaaagagtgtattggcttcagggttttattgtgactcctgtttgaaatcctggtttctaaacagacctgtttctagtagctttaatttaaaaatcggggacaggagagatgactcagcaggtgaaagtgcctgccaacaagcctgacgacctgagttcaatccctgggacaggaccctcatggtggaaggagagattggactccctcaagttgtcctctgacccccaagtatgtgccaaggcatgtaccatcctccataataagtggatataattttgaacttttaataaagtaaagctcacagaaaccattaagaatctgatttctaacatttcaaagctaggtgacattcagaaaatgaccttgcctgtgccctcatcccttcctgtgaatagcagaagtgacaacattttctctttagactgttgtaaatactaattttagtctcaggtactcaagaggctgaggcaagaagatggttcaagcccaagattttgtgagtttgtagttagcctaggcaatgtaaccgaaacttttgtcaaaagaaaaaattaaataggtacatagacagattgttaaatacatgggagggttttggatacctagtcctagaaataataaatgatagaaataatgataataatagcttgttaccaatattattatattggtagaaatattactggattgtttctttgaggtcatctgtttcccagatttgtttgtttgtttgtttgtttgtttgtatccagcttctcactctagagcctgtactgattaaactcatgtacctcctaccacagcttccaagttctgggcttacaggcatgtgttaccatgcctggttctagtgtggttctagggctctaggctgaccataggtggatagtacacaaggaggatggatgttattggtgttgctatgggcaccatcttttagaagggtaagtgctctccacaccctttccccggtcaagtatggtgttggtcactttaaataataaaatggcctgacatctgaagcgctggaagataaagtagggaataagcttgaagtcatcaacacagaggactttctgagtaagaccccagtgggatggcatgaagaggctgcttacagaatgggcaaaatatccttactgacataaggtagtaaacagaatatacaaagaattaaaaaagcaaaacaaaaaaccaaacactgaggaaacaaaacaacccaatttacaaaggggctacagaactaaacagagttctcaaacgatgaaacacaaatgactaagaaacaattcttttaaaagttcaatatccaaagttaggcatgatgcccttaatcccaggactttagtggcaaaggcaggcagatctctataagtttgagacaactttgagtcccaggacatcttgagctgttacacagagaaaccctatctcaacaaacaaacaaaaaagctttagcatccttagccatcagagaaatacaaattaaaattgctttgagatttcatcttatcaaatggctaaactcaaaagtcaaataacagcaagtgctggaatgcatttgaggaaaggggctcccaaatactctctaacctctgctccattgctccaaccccttgagacaattcttaagcaccagggaaacttttgaatagaagcactgtcttcaaattgcatcccagatgctttgaagcctccttccacaccgaagaaactcaaattggaaatattaaattattcattatgagtatgattaatgcacgaaggaaaccaggaacccaaatcggtgaacccactcttaaagtgcaatcactggctccacgctgaggatattagcaaatgaggataggtgttaacagatgaatgcagatgttaagttaaattgtttacagcacacaaagtaacttctttttaaagaaaggtttccttagtgcttgtctttttaattaacaagaaataaacactatagtaatcacactgcttaaaggctctctgttgccctgcagagcctccatactaattaatttcaatgagctttaacagatacgtaaggagtagctcctatttgtaaaattctttgttgtcgttgacaaaggattaataggttttttaggagaaagatacaaaagataaaagtaggataaaaatacttggaacaagtaacaaaaaaaaatccacaaaatggattgtgtttgactgaaaaatcagaaaactgaggctggacagatggctcagcagataagagcatttgctgatcctggagaggacatgggctctgttgtgggagccaatgacatttggagtgaccagcctatgggtgtggtttctccagatacgtgcctgaataaaactaaggagggggccctgtacccgctctcttggtgaggtcagagccagagcaagtgatggagaagcagcttgtgattggcctcttcacccttggacagaatgacaggaagaaggcagctggatcagcggtggtgtctacttcgttctgtattcatcggcttgttttttcattgcaccccttaataaattattaaatagactttcgtgggtctcatttcaggcttcaatttccaacacccacatggtagctcataaaatctggcaatccaagtccaggggactcaacaacctcgtcagaccccacagacactgctcacaattgggacacctacacacatgcaggcaaaacacttgggaacataaaattttaaaaggaaaaatcagaagactgttcacatagatgacagatgataaggataatgaagaataaatggatggatgaaggcaaccacagataaatgatagactgataagtaacataattaacaagagatagatgatagatagacagacagacagacagatagatgataggtcacaggttagagagataaatgatagattattaactaatagatgatagaaagatgtatagagaatatatgataggttgataagtaaatagataagttgatagatgatagagcatacatatatacatgaacagatgataaaaatagctagatgaaaaagagttttacaatttgagataagccttgaagcataagtctatttgttatctcaaaggtaaggaataacatcttgaggtttcaccacttagctggcttttcagcctggcagttttcttcttgaaattattaagatctcctgccacagggacaaaggccatacagaggtccacgagaatgcacagggtgtgtaactgaacacctacttgatgcttaatcagaagatggtactaggtgcaggtaggaggcagtggccaacagtcactgggcatgtagctaagcactcaggttttccgaagaaaaaggtccaagtgtttagggtggatcagttaggagctcttccagcaaagtgagaatagagtgatcactctagctattatgcatatattatatcagaacaagaagaaattataagcacaaatattcactggttcattggagtcagagtaaggttcaccctcacttagtcttggaaagcacaggcccacgactcagccactccaagtctcagtttccaatcacaggaatgccctggggatgaaatagaataagataggagcaaccttcagccaagtgtgaacagaactcagctttgagataatagatatagaggttattctcattgccaagaaagaaactggtgcatttatctcttagtgaggtaaggaagcccagaaatggtgtggaaggcaaacaaaaatgaacaagaaacagacacaacgcacaaaggaaaagcctgccattggttaggcttttgagagctgaggccacagcattaaagggatgttttttttttcctttgtaaatagtcacctcctgtggaatattcctttacactgtgtgaatatatatcactgtgactggtttaataaacaagctgacttatcaatagctgaacaggacaaagttaggtgagagagtcaaactgagaacaatgggatgaggaagggcagagtcagaggagtcgccagccagatacagagggagcaggagatgattgtgtcatgcttaaaaaaaggtaccatcatgtagcagagtgtaaataaagactatgcgttagcttaaaatgtaaaagctagttagtaataagcctgagctatcagccaagcatttataaataatattaagtctctctgtgttaatgtggaagtggcttccaggatggggaaactccacctacagtctcctgtatctcaagcagggatttgtgtctctctaactcactgtgtagctgaagatatttctgcttctatcccccaattgctaggattacaagtgtgtcccagcacccggtttatgccagggactgaagctgtagttttgtgtgccctaggcacaccctctagcacctgaaatgcattgccaagtatatcccataccaccatcctccatgagaattttttcctcttcctctatcccaaaaccaacacatagatcagcacatgagttgtataggctaaaagttattgttctttatcaactgtttcttccatgggcaagaatgataaacggaattttgggtcacaggtcttgatatagataaaatatgctctaaaaattgatggcatgcaaaccagcctttctcttcatagccaaccaccaatgtatcatctgtcagcaagcaataacagcccacaactgccagtggcctgatattgatttctcttacagttagcagcaactaaagttgtatacctgcaaacacacatacacagagagagagacagaaatagacagacatatgtagttggatttttgttttttactcttttggggacccaccacccagatccccccccaaaaaaaatagagatttattcttgcttattaatgctcagccttagcttggcttatttctaaccagcttttcttaaattataccatctaccttttgcttctgggtttttatctttctttactctatatatctttctttacttcttaccccatagctgtctgggtagctgggtgactggcccctggtgtccttctctcctccttttctcacctcttctctctttttctcctgcatttagtctctctgcctggcagccccaccgtccctctcctgcctagctattggctgttcggctctttattagacctatccggtgttttagacaagcaaagtaacccagattctcagagttaaacaaatgcagcataaaagaatgtaacacatctttgcatcattaaaccaatgtcccaaggcataaacaaatgtaatatatcctcaactaacattccataacacagagagaggctgtaaaccctacaaaaatattaaacaagtttctcttagaaaaagcaattttgtttcgaagacaaaatttgtttcaaacctttaattagaacttgtgtgtatgtgttgtgttgtgttgttgtgtgttgtgttgtgttgtattgtgctgtgtgtgtgttgtgtgttgtgtatttattgtacatgttatgtgttgtgtgtatattgtgtgcatattttgtgtttggtgtgggtgtggcgtatgtatgtgtcgcctgtggtgtgtgtgtgtgttcaggatttcacatgtggaggacagaagtcaactttcagttgacttctaactcttgccaccttattttctctaactcttgccaccttattttcttgatatgaggtctctcactgggcctgagccccaggctctgtctgtctccaccctgctggcactagggtcacagacacaagccaccacactaagctgcagctttttcataggtgctgggaatgtgaactcaagtcctcatgtctactctgcaaatactgagctcactgaaccatctccccagacttggaatgcattcttaggttagactaccgatgttttcatgggaagctctgaggaccccaacataaccccacactcaagcacacagaagggagcaggtggtgcaggccatacagtttctcttgattttgtataatatgctttgtcaggagtctgttctccaagcttctgagggagagcaggtaactcatgggacagaaacatcagtatcctccgcagacccagttgcatatacctctcaaggttgcccgttgttatgaaatatgacgttcagctctcctccattagagtggataatggagcatgaaccctgtatggcaagactgatgatctatgatctatgagaagaccataccctaagtagaattatgacataggaaaaatgatgtcgttaatatccttggctgtctcttctggatattttccttgctagaccagctaaccgcccttttaaggggcctccttgccatgttctctggccaatattaacccatggttgaagtctaccttggtttattctggttcaacagtgcttatatgcatctcatgatttattccttaaaagtcacggtctcttcatgcatgttacacctggtggccatatgagaaaggagatttcagtacatcctctagcatcacactcaaagtgttgagcaataaaagaaaatattcccaaaaccccccaaagtgagacttattgttgccattatatctctgcctccatagtggttagtcgtacgctgagtcagattcatgctgactcatatgggccaacccagcacagctctcctagagctccatactcagtgacaacatcctggcaatttgaagttagccacgctgagagtatttacaccacagtcattggcaattgctacacatcaaggcttattacctcttcagccacccagagagtcacttcaccagcacacctctgcacaaggtgtctttatttaagtgagataatattgaatcttttaaaaaatgtacatggttacttttttctaatttgttctcacaaaatgacataaaacactctgtttgcttcctttaaaaaaaatctcttctacaataaaacttccttctgaacctcatgctcatgttgactgtgaaattcattcttcaaattcatgaggctgggccagggtggctttggtggttgctaatcttctagtgccctagcccccccctgaattccactcacctgagatgagaaagtctctgtctaattccagagttaatggaagcaagaaaatttcctatataataagaggagtttccactgagagcctttgtattggggttaacaaggtttgatttccttgaggtgtgggtcatgagctggtgtgtacagctggcccaccatgaggtgcatatgcaactctcaatcctggtagttagtctatagtttcacacacaccatctagggacaacgaagtatgtaatcatagattgttttccaggcagctatgctgattagcatgttgttcaaaagagaagtaaatataaaagcaggaaaaccagaacccaaaagagtgtccctaaacattgctggcatgtctggcctctgcatccatgacagaattgccactatagccaagggcctttctggatcctggccaagataaaacttgttaccaagaataagaagcagaaatcacttcctaggttcatgtctgtgatggctagctctaatcgtcttcttaaaacaacctagactctgctggaagaaagcagagtatagctgagaatagctttgaggaattatcttaattacattaattgataagaaaagaactggccactgtggacagtaccattctctgcacataggtcctggaatgtgtactagtagagaaaacaggttcactatgttctgctctccactgtggatgtgatgtggccaactgcttctggttgctgtggccttgacttcactgtggtgacagaatgcaatctgaagttgtgagctgagtaaatcctttctccctcaaggttttttttttgtttttttttttgttttttttgttttttttttttttgtcagttcattttaacacagcaacaaggaataaaactaagacagcccctaagccgattcgaaaacctctgttatactcctcaaagggtgtgtctgcctgccccttccaaggaagcagacctccctgctagactcgtgggaagcctccgtcctaacccctttcaaaaaggactatgcagattccttaagagtcaacctgtaagcactgctgagcttctagttcagttaaaagttccaatggctttgagaacatcaaatgaatgcttgtaatcaattttttccacaccaaggggtaagacatgatgcctaggatttcttcctaaggataaaagaaaaagagaaggggaaagatgaagaggcagaacactcacctgtgactgaggagtgaagaagaggcacgcaggggagtgactaggctgcccctctcagaaattaatggtatattggtaagttcaccagctgtgtgctgagagaggcagccagggccagccagagccaagaaagtgattcccttagagcttctgaattgcaggctccagaaagggaatagcgacacatatcatatccagggaaaaccataaataaagtttgcctctgaaataagaaaagtccagggtgagttagagcctgcaggccagtgcacaggagggaagcagctgggtcaagaagaggttgagacatggagtcctagggcatgggtccccatgagcaaaggggcactgccaaggacagtctggaaaggctcagggcaacttcaagctgtagtgaagttcttgaaaatgcaggaagtatcttcatgggatttccaaggcccctgaaactatccattcagattgctaagggccactgaggaaccagaatatgttacagtgaagggaagcacagtgctatgttacaataaatctttctgccaaatgctgcctgagccccagcgccacatgtgagctttacgccagctgcctgcccgagttagggcccaaatgaatacacagaaacttgtattaggttcaaagctgcttggccaatgactaggattctcatctgttagctcagtcttaactatcataaacctatatattttataagacttatcttatcggacaccttattggcgtccctccttgctggtggatcacatcttgccgatggagcaggagcggagggaaaaaagagggcccttcctgtttttccttcattaaatatgagtctccttgctatgttacttcctgcctggatcatcacttctctactacatttcccagaatcctctttgactcctagtcccgtctacttgctgtctcattggccaaacagtattttatttaacaatcaataagataaacatacacagtatattccccatcagtgctactcaaatacacacccagcgggccactgtctgacttagaagcataaggactcttgtgatcctgaaattctgcaagactagggcaacaatgacgtggataatagaagcagactggagaatggaaggatcagagcatttcaaagcaggtaacagacaaggaactggtcagcagactggcccagtaaatgctaatgctgagaaagaggaagaggtttgtctgagtcactgctctactgctgagaagagtccccatgtccaaggcaactcttataaaagaaagcatgtaattggtggtttgcttacagtttcagagggttagtccatgaacatcatgacagtagctgtagcaacagctgagagttttacatcctgatccacagacagcagtcagagagagggaaactgagcctgatgtgggctttttgaaacttcaaagctcatccccagtgacacacctcttccaataaggccacacctcccaatcctttccaaacagttccactaacttaggaccacgaatttaaacatagcctatgagagctgttgttttcttgctacgaagagacaccatgaccacagcaactcttataaaggaatcatttaattgggactggcttagagtttcagaggttgaatccattgccatcatagtggggagcatggcggcactcaggcaaacatggggctggaaaagtagctaagatgtctacatttgcatacagaggagcaggaagagagagagtctaggctggaatgggagtttgaaacctcaaagccaccctcagtgacacttcctccaacaaggccaccattcctacaaagtcatctcctaatccatccaaatagtgctactccctgttggccaagtattcaaatgtcctttaggggccattctcatccaaaccaccacaaggcccaagctaacaactgtcaccacttttctattgtagctacttcaagaggcactgacaatgacatttaatctccgcagaaaagttgatcttggtacgatgacccagctagaacctgacagagacccatgctagaacaaagatgtcttagaaacaatcctaaaactccccatgaaactgcattcacacccagcaaatgtggacagtcccaccggaaggcccatactcctttggcatgagctggcaccaccagctgcaagctaagtggcttgaccatcacatgcgatgtgagcaaagagtcccattcctctgctcctttaccccctatatgctcagtgtattttcatctctaacgctccattcaggcagaactctccagcccagattcccagggggcgtggcattagcagctcatccatcttagtgaaataactgacgtggaggcacaaaaagacttagaatgcagttgagcaccaagtaatcgatccactcactggtgataaatctaatccaggcgtcttaatgactgaaagcagtcattaggacaaccaatggcattgcccaatcaccgccgtttaaatcttgactgtctgcatctgtgtggccattgtctgggctatgagcagagaatcccaaagcagacaagcagtttgtaggtttagcatctcttcttactgccacacttttcacttaacctaagagattatgctagagcttccacgctgagcttgctgctgagtcagacaggcggcagtttgtgctcaactgtgtaagatgcaggtcacccttccatgaatacctggtgcctgtatgaagactgccgggggattcatgatggaaccccagtcttcccccaccagcaggctgatgtaggctcagcgacctctcccagtgtgtctttaggtgactcgaattctctgggttcagtctgctcttataacaagctaaacaatttaatataccaaacttcatacatttgctattttatatttgaattcgtttatatatttaagctatttaaagctatttagcccttgcaattctgtgaagtaggaatcattttgcacataaggaaaatttgatttgtaacaattaacttgccaatctggggatatacttcagtgctgaggagttattgaaagtcaaaacatatctgtcaagtggttatatacacaaatacagattataacaaatggagaagaaagagacagatgtggccagatggcagggctggggagagcatcaggatgaagttggtacccacatctgtgcccagtctaccacatctgagctaccctgtgagtcacctcacttgatggatttcaagacccagctggaccgtagaggaaagttcacagtaaacaactataaatgtgtgcaatttgtaaagacgatttggatgcacagggtgctgtgctgtttacaaagtgcttgcatatgcatgatcttatttgcattctgaggctcatcgatgccttgggcagggaagatgttaccctagaggaaggtcaaaacttggtatgaaagatagaagacacatgctgggcaattctgcccgaccaggagtctagttaaaacagttggattagagatgtcacatgatctggggtccagtgactgtaacacacacacaccccttgacctttacttttacagctttagaatgtgccgcagacatctccagccagcctaatttatatctttctctaagggctgcaagaaactgagaactcaaaaactttgctattcaggaaacctaatgtaattatgttttcctgagtcagggaaggttaatgtgcccatttgttggtagggggagccattatcaacttttccactaaaaattagcgtatcactcacagtatggagaagagacagacatgctctggacagagtgcaagagacaaggtcacatcagatactaacaacagcagagaacaggtaaaggaacaagacacacaaaatagttaccagggtctttctagaggctctcagaaggtggaaagagatggctcaggtagagcaggccaatggtccaccatctcggctgttgctaacccaactctaaagctggtgacacccttcctgccatggttccagagtatagagaacagagctggaagactctgtgtcaaaggcagaagtgattcccactgatgagtgcagggtttccgtcagacatgatctcactctgaaggctggggctcccaaactcatggtccagagagagaaagcactccttacagatctgcagactcctcggattgttcctgaagccactatatgagttactagctctatctggaacatagttctgaccacttcctcctcccaggacatcctttccctccatgccactgattaatttaactcattttattttctgtgacaactcatttgctgtagaaattactctgaagcttaccatctgccctggatttgtgatgactgatggcctagctcgtttgtttgaacacagagccctaaaacacttttaaaataaaatataatccctaaattcttggtagttctaggcgccctggcaacattcagcccaatttgccttgtttttgaagaataagatgtgaccttcacctcgggtgttataagtggtaactcttttccttcagattatcctcccttcaagatcaactactataatgaaatgttgcatatagttatgtgttattgtactacttagcaaatgaatatataataaattatattggagataatagttttataaacattaaacctttaactcctaaatcactgtagctgggtttaaaatttaattttgatggttattttactccagatctatacaaggctttgtggagttcttgcttgactattacgaatttgtatacctacctgtttaattcctagcttctcactcaaatgctcaaatagatatttctcaggatgtacaaatggttaacaagcacatgaagaaatgtccaccaaatcccatagtagatcaaaaaaatgtgacttatatatacaccggaatactacttagcctccaaaaagagacagtcccgccatttgctgcagtgtgggtgggtctcggaggcattgccctaagttaaacagaaaggcaaacatcacacaatttgattcacatgtgggacatacaacagatgaattcagagacgcacagagtagagcagtggttgctagaagtcaggaagaaggcggacttgggagagatgagccccacatcattgcagacaggaagagaaagttccggcaccccgtttcccagtctgcagcgtgtcgttcaagcagccaaggagaaatgattttgaacttctgactaggctcaggccccaacccagaggacagtgctgcccacatcactcttgcttccttcctgcggtaatgttttcatacgcacacccagaggtgcacctcatccatgccctccatggcgatcaactcaatcaagttgacaataaaggttgcgcatcacaggggccacagataaataagaccagaccctgatttttttcattaaattttcttcatacaatatatttttatcatattctttctccccccacaatctctcccagatcttcttacctcccgacctagacaactacatgtacccatgctcactctctcaaaccagcaaacaaacaaaccacacaccaaaacaaaaagtgcatgaaaacccttggggtttattttgtgttagtcagctactcctgtgtctatgtccccttctcagtgctgagattttgtctggtttgaacccatataggtcttgtgcatactgtcactgtctctgtgttgtctctggaagtctgcctctctgttgtatgttgttgtatctggaagacatgatttccttggactgatccaccacctctgactcttacaaactttccagatcttcttccatatagacccctaaaccttgaggaaagggtcttgaagacattccatttagggtggagtgttccatagtcttccactctctgcacaatatccagttgtgaagatattaatgaggccccatgtgagagtttactggatgagtgccctaacaaaacacacaagggtcccaagtaggctagctcaccagccacataacatgacatccttctagaaagatttcaagcctttccccttcttctctcaaaattagattctcttatgatgtccttataaaaccagcggctaataaaactgcagaaaacacaagcaggaaagcagctgtctaaatcaataatgtcttccctctgagatgccgactgcttccacagagtacttaaaagaaactgtaggcgtgtgtgtgtgtgtgtgtgtgtgtgtgtgtgtgtgtgtgtgtgtgtgtgtgtgtatttccatttcttagtgaagagtgtcacccagaatctgctgcctatttgagataagctctgcgttggtgacggatgagaacatgccaggaaattgaggacatttgggtattttcccaagctgcattaacacttctcgtgctttttagagattagaacttttatcactggctcacacacataaaaaatttgtattaaactgtacaatttgagagcagaacagagcaaaatcattccctttctcgggatgctaggtgatgatgtggcagaatactgacaagagccagcgctctcccactgagcttaccttccccatgcagggagagacaggttataagtatggagttggggagctgtcttctttgataaatgaagtgaagagccaaacttgccctttgatgcaagttcctagatagaggagaagcaggaattaccaagatgatgccaactaaatgcacagtaagtaaatttgggactacagcacatgttcatccatggtaatgacacagtcaagaaaactgttaagcaggtgggagtcagacaggacgagacacaaaaggccaagcatatatgagaaaagatggcctaggataaggtgcaatggtggtggaacacagggggcctcgtggccactttctgaatgcttgccatgggtcatgttttttctttaatttaatttagtgtttacacgatttaatttagtgtttacaatttcaactagctgctataattctacagtctgtagataggaacatctcaattcactaaatcaaggagctaccaccactccctggcacaccccacttccacagccacataacaaggcaacactcttgcccaaggtagaggtgggcctgggaaaagcagcccgaatctttagatcctctgtgacaacacagcagggtcttgcaggacagggataatggcttaaagtttcttcatttccttcatgtggggtattaaaaatgaatgacccagggctggagaaggaactcttccaatagagagcttcccttgcaagcatgagggcctaggtttgatctccagaacccatattttaaaaaagctctgtgtgtagtttgtgctcataatccaagtgataaggagaaggagattagtcaatctctagggtcagtccagcctacaggcatgtttcaggttaacgagagactctgtctcaaaaaataaatggtgggacacacctaagaggctgtcatctggcctccacacacaggcacacacacacacacacacacacacacacacacacacacacacaggcacacggggggggggggaatccactctatgccaaatgtgcccacagcatccatcccagtgaagacagtgggcatctcagtgggctgaggccaccaagctatggaagggagtggtagctgctagttacacattctttaagatcactgtctctctgactaaatgcctataattcagagctgctatctggtaccatgacaaactaaacaggcactaaccactcacaaagagctatcaagaattttcagaatggtaccaaagggtcctgagccaactagacagaagggatgcccttgtgattttgagtaaccatttccaagaaagagagaacagagtcatggtatgggcttgactcaatatacagagtggagcttctactgaatgtgagacatggcaaagaaggatgaaagatgggtcctctaccttctaaagtcttatcaagtcagaatgagaaatgaccttgcaacccaagagaccttattaatagttggtaccatctatgatttaatcaagaatggttaagatgactggagccaggggagtcagctgtctccatggagaatgtaagatttgggatgagcctttaagaatgaatacggctgtagagtggggaggggatggaaaggggaaaaatgacatgggaagcaaaatatgccaaaacatggtgcaagttggctctagccaagatgtatggaatacccagagcccagacatggcagcctcgaatgccagcctgaggaatgagcacagaggttcatgctagctaatttcaaacaccatcagtggctgcatttctacaggcctttctgttttccttgataatctaacaatacctctatgaaaagctaggggccttccaagattataagactccttctcttacagaactgtggcctccaaagtaaaagatatctcattgaagtgtgtgtgtgtgtgtgtgtgtgtgtgtgtgtgtgtgtgtgtatttgcaagcacctgtgcacatatgtattcatgtgtataagaaccataggtcaaaggtcattgccaggtctcagttctcaggacacggtcactccatctttttttttttctttgagacaagatctctcattagtctgaaattcactgaagcaacaaggtaaagagcaggaagccccaaggatccacttgtctacccctgctccatgcagagataacaggtgcaccatgcaagctttatacataagtgctgggattgaagtcaggtccccattcgcacaaggcaagcacttcaccagctgagccatcaggattttatgaagtatgtcagcaatgctgtctgtcactaaggctcctcaagaatcccagctctaagtggcatagcttttaatcccagcacttgggaggcagaggcgcagacagatgaatatcacctgacttcacttggatacagagcagataaaaggaacacgcagaagtagataacacaatgctggtttctagagcctaggggaatgtggaaaggtaagcacatgctaggaaaaggatgaaaagtctcagacaggaggactcggtcctgagctctacagtacagcacgatggaggactcagccccaggtctacagtacagcatgatgtgctgtaggattaaaagtagataagaaaataggctccaaatattgccacatacaaaagtgatatgtctgtaagaagatgatggtgctaaccaatttacttatgttcatatccattaatgtatgatatattgacataataacttacatatatattaatatatgataacatgtttgtatatggatatatttcatatatgatatatagatacatttataaataaatttatttgtgtattcacatattcacatttctataaatcaaaataccactccattaaatacatacaatttttcttgctaattaattgcaaatgaattttaaaataaagataatcagccatccttttatttagtaattcatttggtgataactaattaccaggcaaccatgtttcaataaaaagaaggaaggctttaaaaataaactgaaagtatcacaaaatatctaatttaatcaggacctcaaccactgaaattttatgccataatcaccagctggagctttgctgggctccatttcataggttgacctggcggggtatggaagaggacaaaacagattacagcaggatgggactaagccacaggcacctctcaggctccctccacaacatcacccaagaagagttagaaatgtccactcctgacagcaaggcagaagaactaccaactgtctttctcagtgaacacacacaatgttaaatagaagagagatgttctttcaggaaaataggtaacatcagtgatcacccaaatgagaggaatgagccagtaaaccactgtggcccattgcatcccccaatcttctaacttttaaagatttgttattttttatgtgtatgagtgttttgcctgtgtgtgtgtgtgtgtgagtgtgtgtgtgtgtgtgtgtgtgtgtgtgtgtgtgtgcaccatggacacaaagtgcctgtggaggacgaaagagggcattgaatcccctagatggttgtcagtcaccatgcgggtgctggaaatggagcctgggtgctctgctatagcagtgctcattcctagggctgacattcaaggcttccatgcctgggctctgggtaccactcttccactctccaggcatcttggctggagcccctccccatgcctaagctcattttgcttccctacatcacttttccctccaatctacagctgtgttcactcttaaagacccatcccaaatctaacgttctttgtggagagaactgactgcagtcatcttaacctcaaagccatctttccatcccctaatcatcttcttagataagctaaaacctgctctggaaccaaaaaatatttcccatgccatttgccaaactgtaacacaaaagaattagcctgtcaagtcaacaaaacaatccaggatatactgtatagacaaaaaaaatgttgttagtaattctatggatgtttttataagaatatatctgagaggagaaaaaaagacaatccaattcaccaaaagcccaagacaacaattagatcccaagaaatcaatacagtataattttctcttatatggcttttcatatatactgtatcacagagggatttgccaaattacaatttccaaagtgcgtgacagtacaggatacaaattaccaaaacccactgctatagtagaaagatatttcatgacagctaaattaaaccattcaatcatgaggctggaaacaaagacagaggggcctggctgggaagcactgggccaaagacctgaaagggagaaacagcaaggtggcttcagctagggaaggcttcgggtaggggacaggctcaggaggcccatgtgctaatcagctttctgtaccaaaacccagagacaatcaacttaccaagagaaaaggcctgtcttggctcacatacctattgcatttcacacaatagtgtcattttaaaccatggtccctatgacatatcggtaaactacatcttttgttccaaacgtgatgtcaccatggatgtgcaaacccaaatggcttcagaaccaccaatgtgaaagtcccaacgcactccgacatttcgctgatcttcattggattatccaatgctgctaggactcagcccttttcaaatgtgcctttcctgtcaccaaatattaccgtggatattagcaccatgctagaattccaagagggtcactgatgggtgagcttttctagagtcggacagaactttccaatgcccgcatataattacttgaaggtcagagttttagagtcaacacatctggggttgtttctaagttgttcccatggctttgggaaattgccttgggtataaaagcaagcaataatattactataacccaaaagtggcttgcccacacatggctgactggtgagataactcagcagtgataggcacttgttccaattgcctgctaacctgagttccatacatggaacccacatggcagaggtgagaaatgattcctaattcctgagcattgccctctgacctccatccccatgctgtagcatgagcattttcacattcacataaacacacacacacacacacacacacacacacacacacacacaacacatgcacaagcatgcacaataatggcaggtagataaaactaaaatacccaaggcagtttctaggacagtgtaagttggaatgcctggcactactgtgataatcatcccttcatcacctcctcacttgggcattgcattaagaagccccggtgatacccttcctcagcattcagttctcagtggtccctgggtcttgttttctgaaacccaagtcacagtcccttctctcacacgctctccagcagtctcctgaacagtgttttgctgttgttgtttttgttgttgttgcacgtattctacagagatgaaagtaatgattcttattctcaccacccagccaatgtcaagctcatttccccttgaggctcacttcagagccatccccaattcacaattccagcacagtcatacagtaaatactttatatgacgatgctttgtgtgacacttcttcaaataccttccaaatcccagggtgacttgttctctttccaactagaagtcacattttaaatatgccaagaaagctggtatttcatatatccaaagatgagttgtgttaaaaagcaaagcactcgactttaatatgatcactcatgccctaatgtgcctatttcatttgtgttgattcatcatatttgtttaaagtatgtccttccaccctatggaaggcctcaccatcccgggggagcagaaaggatttgtgataggtagggttttagtttgggggggggggggtgttaggggaggacgggagggagaaggaaactgggattgtcatgtaaaacaatcctgtttctaattcaaattaaaaaaaaaagtatgtccttcccttggatttttaatttttgtcaattatttgtgttatatcacagtggcagacattcactattacaacttttccttaaagttcctcttcccttccttttctttgtccatatatttaagtttgagcaatgagattaccagaaagaaccaaaactgccactagcttctcgaacgccagacctaaagaaatccattcagtgggacgtgattggcgacagctctgtctgtgctgttaaaagccaagcttagcaagaattctaatggagtcttccaaacacatttcctggatgagagccgcctctctaattgcattagagtgtgatgattgtgccatttccacctattttgcataaatctgaataatacactcaagtggccctaacctctacatacgtaataattagtgcaattaattactataaatgtcctccagccctgtactctgggcacaacagacatgaaatgcataatatgttttaaaaataatcagcttaattatcttccagctactgttcctcagggacatattgtatgagagaatcttccagtgctagatgccgaagaatcgagaagaaattatcaggagcctgtgagaagcttgccctgacaggtgtagaggccagtgggtgtgccaagggcagcattagattgtgggtatatgcatttgggggtcaaggaaaagtccacttgtagtctagctaatggtgaggaggagacagaatccagatttttcacagcctaaacatgtgcaactttgaactgccttccaacataagttctaactcagccaggcaccttgtgaagactgagcaagtataattgagtccttgcattcccacacctcctcggagacaaacatatgatctctactgcacgggggaaactgaggctcagggaagttcctttggcctgccgcgtgctatacttcacactgtactttcacagtacatctcaccattcttgtttcttgtgttctgttgggtccaatattaagtggcattgagaacctacatttccatctaatcctcatgtctttcgtgtctaggaaacaaatgatgaataaacaaggagtgagacttaggaacctggccctatggccctaatcatagacctcaggggtagaacagaagatccatggttcacatttggcaattcatgcaagccatgccttccttcatacaaccttgttcattcccctatctgtcttcctctaacatcaacaaatcaacaaagtctgctttcccgtaaggctcctttctaggacccagtccacctccctgcccccaacttccacccctgctttactgctgcctccttagctgtcctctgtcatagcctggattacacagtgtcacagcctttgcttctgcatccttcatcaggaagcctcccctccccaccacagagcactactctatctcaacaaggtctaagcagcacccggatattgttacagtattgatgaagaaaagaatgttgtagtaactttaaccctgtgaagtcttgggtttattatatggtctacagtccattgaatctactctctctgttccttcccctcttgtgtcagttatctttctgccattacagaaaaatgcctggccaattagcttataaagacaaaagtttccttggggttatcattttggagacctcagcccattatcagttagccctgttgctttaggtcttgggcagcacattggggcatgactgcttggcaaagcaaaactccttaacccatagctaggaaggaaaaacagaagaagagacaagattctactactctctttaaaggcacattctctggaatctaataatgaccaccactccaactcagtccccttcttaaagatatcatctattcccaatagcatctctctgggaaacttttggggaccacggaaagacacaagcttccctgaagtaagcaacaccccaagcaaggcttccataataactatttaccttcttttctcactaaaaccccattgtatgtttttggttcacaaataggacacagccaagtactgtgagatgagagaaagtagtgttgaaagccagccaattccatgtgctccaaggaaaccagcaaaggaaatacccttgaacccagggtgtactgtctcaatattatggatacattccaggaacctaaagaactgtgtgaagaaatttatgcttttccagaatcttctcccaaagttttcaagacgagaaactaggagttgatgaactgttttattttaaagggggagctagaaaactaatgcttttgtggtaaggttgcagatttagcaaagaaatgtgtaggctggccagaccaattgtcagatcacaaagaagtaaattttcattgtttatctcatgaggcacagctgtgtgtcctgttctttatctggcaagatgacatgcagaggagctcctgagtcatttgtctagaatgacttaacacagaagttgactactgggggccaagcaatgttcttatgttcaacatggaagacactgagtcaagtcaatacctccatgagttcacctggatggtcactaaacacatatgaggacatagcatatttgtaaacatatgtgcaaaatccacaaaagctctataatgtaaatattattatcatttgattctcagaaggccaagcaatctcagagcgaatgagtgacagagtggtgaccctctatctttctgccactccaaggtcaattttagttcaatattgacctggtgctgtccttaccctttttgtgtcattgtgacttccctggcctcctgagatctgaattcttgttcaagagacaaatacactgtgttctccctcgggagaagtttgctgcaggggggaaatgtcctagatgcatttcatggaacagatcggattgtgtctagtgccgggagactgttccacctcggaatccacatacccacatgggtcctgctgggcttgtctcatacgtgtacccacttaaaacagagaagccaggcgggaggatgctttactttacttcaggttttgaattttcttgagggatgcacaacatacactgactcgaataatgtaacataccctaacaggtgtggacagggtcttcctgtatattatagaagcaggactcagtgtggagtaaaaacattctgtttatggttcctgtcaatctccgtctccaacagaggggagagatcaagtctgcccatttccatgaacgtctatattccagagtgttggcacataaatgattccctgtaaatatttgcagagaacagttcactgttcgtgtgctaaaaggcccattcttttgagtttgggtctaatcttttgtgggggaaaaaaaagtgttccacatgtcagcctgaatgagtcctgagctctttctcagaagtcaaggaaggagttaggaggacccttgttaaggtgagggagtgccttagagactgtccaactgaagggttccaattaatgggctctggggcctgtcagagccctgtacagtgcctgagacaataacctctccacattctctctgcttccttttcttcccctgcaaatgagtttgttctgcatcatgggtttgttctgaagatgaaagatgaatcttgcaattgtgcctgggtcataacaaggactcccataactcctaaataaagcttttattaaagagttaaattgaagtcatcttgatgaacgtctgttttaaattaaagcaatcttttcttaaaacatacaacacattcctccaactgtaagctcaaaggagagagcttagtacttcaggaggaggtcaggaaagcagccagcagtctgcaggggcacattagggtcctgccggcctgtctgacacatgctcccctccacagtgccccgtgggtggcactcctgcacctgtatccacgtgaactctcctggttgagtagcactgttgttatcacagatctgcccccccccccatttgtgagctcctgtaaggtggaaaacatggaagtttgcttccttgatttctagtccctggtgtgaaagcagggacatcagaacaagctcacagatatctcgtgtgttctgactttgagccttgctgacgtgtgaggccaagtatcgggattaataagctgagtgggttggtgtgactgttccactaaagacctctaagagactggaaggaaatgggaggactcccgccgactcctgctcctcctccctcagagctttcctgtcacaccaccagcaactgagggcctgtgtcctaatttgtgttgggagcatgaaggtgcccacagatctccagagacgttaaacacacaggatgggcctctcaaaggaaagggcgtaaaacctggttttctgcccagaaggctggggttggaggtgattaataaatagccttgggatctgcattctgagaagggccagaccctatcaagctcccacagccaggacctgaggtggcaacagcccaaatgacctctgcactatctgtatgacagagacgccatatccttccctaggcccctgaactagtactagaagcgtatgtccagacccatcttcttggaagaaaggacaggtactttgagttgagtttcaatgttattatgcctccttgagcatcaggtgttgtatcacacctggaaacttatttcccaaactggaccgtgtttaaatgtgccagcaataaactgcctggggtcagactctagaagtttgatccagtctaagtcaggatgaacagagttttcatcctcacatctatacatttcttttccctgccagccaagatgcttgcagggacacacacacacacacacacacacacacacacacacacacacacacacacacactccgatcaaaggaactaaggggagaaaagggcttccatccgcataaaattgcaggtcacaatccatctgggcaggaactggagcagaaaccatggagaaaagcttctcattgcctggctctctggatcaagctcagttagctttatggtatcttcgcctgtctaggagtggcaccacccacagtggactgagccttcctacagcaatcatccatcaagacaattctcacagacatggccacgagtcaatccgatccaggtgtttcttcaactcaggccccctcttcccaggctctctacatgtgtgtgaagttgacaataaaagctaaccaagccagcctggtcccagctaccctgcaaatgcacgttcattcatggatgcttggctttcaggctccggcactcaggccaggattaacatgcctcagagcctgcccaccaaacttcaacaaacccacatggagtttatttgggacagggagcaaaggaaggggtaggtgatggccaaccgggaacagagatggaagaggaacctaagagaaatgagataaagagacacagatacagagacagagagacagacagagagaggggcacaggggagaagagggaagcaggaaaagcctggtctgccccaggggaacagcaggaaagaggagcagggaaagagatgagccggcagaaagaccgttaagtgggcgggtctttttcttaaaggggtcccttgcatctccatggaaccctgggctgaccagcgtactgcctatgtgcattctgccaggtgacggggcaggccagcataatgcctgaatccttacaccacccccatgccaaatgtgtctccttattcatccacaaatgcagactgacagctgaccgagacccctcctcgatcaaacgtcatcctgagtcctttttaagccaagaattctgccaccagttagaaagaatccaagccctgtatacttttctatctaaccgagctcttcctcatccaagttcctttcatcccccctaacatcagcacctaactacgtctctcttggtaatttcccatgcattctgatggctaatgctagttgtccacttcacaggacctggaatctgctaagggacatgcttctggacagtctatagggtcatttccgggaataactaccctaggggagaaagccctccccccagagtgggatagggttagcagatataaagaggtctgagggagcattagcatggcctgcttgcctccctttgttctttctgatcatgtaccttgatgggggatgtccttctgtgtgggtttatcttattggctgttgaataaagcacggctcggccaatgaggcagaaagataggtgggactaggagtcaaggaggattctgggaaatgtagtaaagagatccaggcaggaagtgacatagcagacaaactcagaaagggacaagaaggaaattgtccccttgctcttcctcctgctctctgctctggagctgctatgtgattccggaaagacaggatgcattctgccagaaataagtcttatgattatggttgataattaagactgagatagcagataggaatccaagtcattggccagcagcatttgtacctaacattaatctctgtgtgttattttggggctcctaacgttgtgccggggctcaggtgacttggcggaaagatttatcgttacagtacctatttattattattattattattattattattattattattattattattattatcagcagcagcagcagcagcatcctttctcctccttctccccattatgggctgaattccagtggctctccggaagccttcctgtcctttagcaccacatcatcaatgctggagcatctagcctagtggacttagcagttgccaggctctcaaactcccaagcatgacattaatggtcattgtgatctacaaagcccctactctgtaagccattctagtgagtctctttttatcacttagacattttactggtcctgttctgatgagggaggtccttctgtatatatgtttctcttattggttgatgaataaaacactgatgggccagtaaagacaggaagataattggagctaggagatgaggagaatgctgggaaatgtaggcagagagagaccacaaggagatgccatgtagagaccagaaagataggactcaccagatgttctctggtaagataaatacatctaaaaatacatagattagtagttatgggttaataattaagacagagctggccaataagaagccctagtctttggcctacaaatttataattaataaagcatccatgtgttatttggggcaaagtggctgtgggactgttcctctaaggactctattctaagcttcttccccatttgaacaaccacctggacagtttctcttgagtgttactttctctgcatgtgctggtcctaaggatacacacaggaaaggtgtgctccccctgcatctgaagggactacctccttaggtcacagccccagggcatcctttgtatacgactgagacatccagagccaggggctgtgtactcatacttttatagccctttgtgccattctgcacaacaaatgttatggaatcagttgttcaacacagtaatcccagtgcaacccagtcctgagaggaaataaaacagttcaaagagaagttaaagcaaaaatggagatcctgtcactgcactaagtcaataaataaataatgtagcagaggttcaacttatcttttgtctttctatttgcacagtgaatgtgactagccagcctcgagtcagtttggactgtcaagctgtcttgggagcagctactaacacccaaaagaagagtgaagatcttgtaggctaggacacctttagtctcttgccatgaactgtacatagcacacttgcctatgccctcagagtcattttctttttcattggagagagaatctctctctctctctctctctctctctctctctctctctctctctctctgtctgtctgtctctctctctctctctgacagacagagagctaaaacttcattatatgtatccaaaacttcaccccccagtcagctttcccccttccagcctctcacattcatcaccctcccaagaggcccagagaagaaggcagtgggtagagcaagggctagagtccagctgggaaagacatggcagaccagggtttgctgtggtgctgcctttgcttggggtatagagccctggaatctgcatcatgaatcccattacctcacagggcaagaattcagctgacctcatagccagtcccgtgcaagccttgctgaggataggaccccactgcatgcagaggtctggagacaggagcagaagactggcacagcgcacactgcctgaaccagaaactaaagaaccttccccacccttgacatctccagagcctctggctccaagaggaaggagtctgattctcaccttggccttggtatgtcctgctgccaggccaatgggaggagactcatgccagagatctgagccaagcccattctgtgtcatatgtcagacgtccacctgacaagaaatgcctgggggacctttggcctggtacatctctacagatttgacactcccttacttcccccaaggagcagagacccacatctcctttagatagtatgggccaacatgatgtgtccaggcaggcagccctctgtgctttctcctctactttcttgactggggtggaaaattcaggcttgctgttaccagcagaggtctctgagaagctgcactgtgtcctgcagtgagagtccgaatcaagggatcctgagatgcacctctccatcctgacgtaagcaggtccctgtgacctgtctgcccccatcctgacccatgcagggccctgtgtcctgtctgctccatcctgacctgtgcagggccctgtgacctgtgtgccccatcctgacccatgcagggccctgtgtcctgtcttctccatcctgacccatgcagggccctgtgtcctgtctgccccatcctgacctgtgcaggtccctgtgtcctgtctgctccatcctgacccatgcaggtttctgtgttctatcttcacagcagcacagggctcttgcctgcagcagaataccaaccctcagctggcacaatagcaacactgcagtaagtgatggcaccactgttaaatgttgactctgggagcttaggtttctccttctacaccagaattttgttcttgaactacttccaccagggatgcccagactctttcgtctgcggctccggaaggagaaatgcctctttcaccacctcctctggtagaatcccctgagaaggtcagaaaactcacagccagaagcttgggaatgtggctcaaacagtaacctaccatgcaccggctccagccttcagcgttgcgtaaactgggcatggcgatacacagctgtaatcctagctctcaggagagaggtatggaaggaccagaaagtccaagtcattctcagctacacagagagctgaaggtcggcatgggatgtgtgagtccctgtggcaaaaaaaagtaaaaagaagaaagaagaagaaaaaacaaacaaacaaacaaaaagcagaaaactcagaaccagtgggattctctctgcttatttctagttagttaacttttcaggcctcagtttcctcctcactaagggtagatgatagaaatgcatgaggttgtttcagtgatccagctctgaaacacctagctcagtgacagctctctgtggacacctaacaaaatgtccacccagttggccctcccccatcagatggacaccatactgacatctactctgggataatcagcagacaggaccttgaaacacaccgtgaagactttggcaagctcaacagcaccatcgatttgcccatgttgagctgtgaagaggttcataaatttccaagagactttgccttcacagtgagtctccgtcgttcccatttattttatgtgttattatatatttaagagcatagtggtagatgaaaaattgttattgaatttattttatagtatcctggctaagcaggaaagaattgctttatttaagcttcgtgacttcggtctcaaacattaataatatcccttgtacgtattatcacagtttctgccatttacacagaaagatatctatgctggcaataggagctttccttgattacccatttgcctaacatgtgcacataaacacacatattttatatctccttttacagctttattacctaagtacgggtgatccctctcatttgggatgagagttacatatattaaatgaaaatcaagggactagagttcagtgatagagtactcaattgcatgctcaaaggcctgtgtggaagagagggagggggagggagggagggagagagagacacacacagagagaagagagagagagagagagagagagagagagagagaatgaatggaagaaagaaagagaagaaaaggttgaggctgttgccttttgcaagcatctttgcaacactcacaggtgagtttgagaggccccgcccctactagagttaccttctggcttcatgaaagactggatctaaactcagccatcagcaggtggttctcgacttagaccttgccatgctaatcctccagcatccacaccttccaccctggagacatactgtttgcctttctgctccatggttaaacttgcaatcaacaaggcactgtgggaatgtttggtctactgacctgggaagttctccaagacctcctagtgaatcagcccccatttcgggaggagaacaaggaggatcttcatataaggtcctttctgggtgctgccctcccagtccagggatctcctgggaaagtcttgctgtaagcagtggggcatcgagtgaaattgtaagtgcatgaaggctttaaatcaatgaagagaacaagaaggcgattcctggctgagattttgcagaagagaatttatgaattcactgtttgatacccagctcatatattcacaggacttggccaagcaaggccacaactaagatggtagagaacaacacccttcccaaacatacccttatgaactgcaaaagcacatacctcaaggatgaacagatgatgagttcctgatagatgctaacagtcatcactctgaatctcgctgtacaagacatagccatgaagaggctggaatcttgagatcacacataaattgtgcttagtgggctgccaagatgactcagcaggtgtactggctactttcctgtcactgtggtaaataccatggccaaaagcaattcacagaagaaagaggttttggggggcttgccattctagagcagtggttctcaacctttctagtgctggaaccctttaacacagttcctcatactgtggtgaccccaaccataaaattattttcattgcttcttcataactgtatgaatcataatgtaaatatctgtgttttctgagggccttaggtaaccctcaaaagggtcatagcccacagtttgagaaccgttgttctagaggagtccatcacggtggaggtaaagcaggaagtggaaacaggaagccgagagaccacatcttaaaccacaaacgcaaagcaaagaaggcaaactaagcctcacagcctacctccagcaacacacttcctccaacaagtttctactacctcttcaaactaccaagtggggaccaagtattcaaatacctgaacctatggggagcattttctttcaaagcctcactgtgtgtgaaggtgcttattgcacgagcttggtgaactgtcttcaacccccagaactcactcactttattatcctttctattgctactacaaaaacacttgacaaaagcagttttaaggtaggaaaggtttactcagcctgcagttccaggttacaatgggtgagtgtgcggaagttaaggcaggaacttgaagcagccaatctgtctacagtcaagagtagaaaagtgagtgcatacaagcctactagagcttagctcacactgtttactccagaatcctctgcctaggacatggtgctgctcccagtgggctggggcttctcatatcaattaacataatggagacaattccccacagacatgcccacaggccaacccataatctctcctaggcaggctttcccagctgatggaaactatcataccacataaaggtgaagagagagactcaactccagaaagttgtcttataacctgcaaacatgcttcagagtacacccacacggacatattgcatatatgtacaacacatacaataatcaataaaaataagatttagttgctatggaaatcaaccatatgagagtcaagaggcttgaactctgctctacgcatagcctgttctcaagggggaaaccagtcaaaatgagaataactctccctaagcccaccctctcaaggacagcattcccagacttccatagcttcccttgggaattacagtcagaatggtgagcattttcagattctgagcaaagttggaggcagtttgtgtggacatagatagcactggctttaagtatagggcttagctcccatggcaaccaggcctgtccagagaaacttatgtcattggttatcaggccttttgtgggacacattgtctcaaacacacattgttctatctcctttcaagggccattttgcaaatgtttcctaaatgaatgccatccaccccctgcagagctctccatgatgtgcccatcgcgggctgctggcatgctgaatgcacttccttcggtaagcttatctaaaaccctctgcctcaagcatcattagacccactttgcagactcagaaattgaggcttagagaaaataagcattttgtccaatttcctgcgtggcaacctgcctccagagtgctcccttggcaacctgcctccagagtgctcccttggcaacctgcctccagagtgctcccttggcaacctgcctccagagtgctcccaaaccatctctgcttagatgtatgcagagctccaggctacaactcgggaggagagaggctagactggccacataccttgtaatacccctgaggtctctgtagataaaactggaggctcctacagttcactgaagtggtcctcgccttgaggttcccaggcccagcactgccagcaggtgcacatcctgggacactgtttcaaacttatggggtggagtccagcaatttgtgtttgattgtttgtttgtttgtttgtctaaaagccaccgaggaactgcctcagagttcttgctgtgtaaatgtaaggacctgtatttgtgtctccagaacctagtaaagcaggaagcaattgaccatatctgtaatcccagggctccgacaggcagctaggaggcagagatgggagactctgtggaagttcacagaccagttagcctggcatatgcagtagcagacagcgaagagaccacgtctcagacaaggtagaagacaatgactgacacttgagcttgtcctttgacctccatatgcatgctgcagcaagtatatgcatgcatgtgcacatgcacacgcgcgcacacacacacacacacaaacatgcacatgcacacacacacacacacacaaacacaaacatgcacatgcacatgcacgcacatgcacacacacacatatacacacattgcacacacatatacacacatgcacacacatacacacatgcatacatgcacatacacactagatttctgcatcactctagggactagcagacttcctgcttaagagccactgctcacaaaccttctttggaatagccagagataggcagataggtgatatgtaggtaaatgatatagatgatgattagatgggtagataatagataggtgatcggtaaatgaatgatatagatgatgataaatagataacagttagatggcagataacagtgctagatgaatagatagatggtacaaagacagacaatagactacagattggatggataagatagatgagtggtgtgtgtatagacatgtagacagacaatagacagaggataggcaacacagatagactacatgcaagcatttggaggtttaagctttggcacattttcaaatgtaatttagtgaaataaagcccctctctgtctctctgtctctctgtctctctgtctctctgtctctctgtctctctctctgtctctctctctctcattctctctctctctctctctctctctctctctctctctctctgtgtgtgtgtgtgtgtgtgtgtgtgtgtgtgtgtgtgtgtgtgtgtgtgtgtgtgttcctgtgtaacagaaatggacagagaaacctgaagagattcaacaatttcttggcccctcttttttgttcccttctgactggccaggccctgcctagcactggtctcactggtctccaatgagaacactaacagctacatcccacggatcccttcagctggctgctttgccaagaacatatgttcctctgaaacaaataggaaatgatgaaaattgaggggcagagagcttagctttgactttcagtgtactctgccacttgggggggggccttctatctaacagctttagggattctgagtcaaaggctaattaatgcctacacccacagatgatataaatatttgaaaaatcatattggatccatctgctggaactgagcacaaatttgtactaatctagaatagtggcttccaaatgtgtcttgctgaacaggcattcatccacaagcagactggagagttccacagcaatataggctattctagtgacctgggcagggttgtttttgttgttgttgttgttttgttttgttatgtttttgtctatgtgtctgtttgggtgctgttgttgcatgtgtgtgtttatgtgttatagggtctcgtgtagccaatgatggacttgacctccttctatcctgcctctgcctcccgcctggggggttataggtgtgtgccatcatgcctagacacaagcacactttcaaaccatcacaggaccacgcaaaatgagtgctgcagctcacctagagcagacttgttgaagatggtattaattttttaaaactttattactattcttgtgtgtgagtgacagagagagagagggaggaaggaagagaaaggagagagtggagagagacagacagagaggaagagagagagagagattgggggagcgcatacccacaaatgccacagtactctatggaggacacagtagagttgttttcctccttctacctctccatgggttccaagggtcaaactcgggtcaccaggtttgcaaggccagtgctttcacccagggagccatcgtgccagccctagtttaaaattaatatgcatctacttcatcgtgtgggcttttaaaggtcttatttttaattatttcagacaatatttcccatttttgatgaaagggacagtgagagaaaatacaagatttgcttacatacagatggagttggagaacattagggtcattgtgaacagacagacagaaagacaaatattgacaatcatcactcatttagaaactgaaaggaaagctgatcgtacagaagtagtgagccgattagtggctgcagaggcagtgtagtgccccagggatataaaacaagagagaggcaggggaggggagcaaaggagggaagggagaggcaggggtaagggaaggaaagggaatagtggtcactcatgctgagaagatgggaacagcagggaaaggtctgctaagtgctaaacagcatttgcatggtagggattgttctgacgttctgggcacagaggggtaaagtagtcagcaaacccaggacacttctcaaaacaactcaaggagaaagtacagcatttgaaatgaaaacaacaaataccctgagctgaccattacatagcctataaatattatatcggcaaaacaatacaacaaatgaatttatatatatggtaatttaaatttttatttaaaaaataaacacatgatatgtattatatataatatataactcatatataatatgtaagtatatcatatatatgtggggagagagagagagagagagagagagagagattcttgctgtataacctagactgacttcaaacttatgacccctctgcctcagcctcccaagagctgagagattatagacaagccaccacacatatctaaattaaatgtttctaagtgtattctcgagaatatatctaaaatcaagatgaagagttgggtgggcagaggctcagtttgtagaatgcttgcctagcatgtaacgaagctctgagttcagttctcatcaccacagaaacctgggtcttggtggtccatgcctgcggtaccagcactggggaggtagaaacaggaggaccagaagtgcaagctcactctcaaaaacataagtttgaagttagcctggtctacatgaggcaccatctcaaatagaataaaataaaagtaaaaaccaaactgagacatcacaggttttataatcattgtgtcctctgaggcctcctatccgactctatttttttattcaatttcattaaagccattctgtcttatttctcaatgttcatcttacatcaagtggatttcatgaccctctaatgcaaacctcagctccagcaggcagggatggagggactaggtgtgggaaagcgaaatgcttcctccatgtctgtgctccgccagcctgggcaggggtgaggcccagatccattcaccatacagatgagctggtaacagatcaccatggacacataagagaatgaggtcactggcatggtaagaacccagggatggacccaggctcctcggctatgagtgacattgtatgaagtcatcatcgtaacgaggtctaaaagcaatggacttgtcacataaaggaccattaccgtcaccccagagcatctgaacatattttatttattagtatcaaatacagtcgctggccagcaccctctgcttcccacttcctgcctttggtaacagaataacgggtttaatgaaaacaccagagtagaaatgacaagttttcaaacagcagtcaccaagtttagaagcggaaggaggaaacggcatgtcctctgatgtgagcacaggctcacagtgcctacttctgatcaagggcaattgtcccctccaccccaagcacagagcaccctaggcctcctgatagaagactctgctattcccaacttgtctttttgtaactcaggtggctttcagctacattggttgacacttaactccatgatcttgatgatatttcacgtgtttgtgttttattgtgttttcggtggccaataagcctgtatcagtaataaatgcagggcattaagtatattttcatgatctcaagtgacagaaatgaggtctcagggtcagataactcagtggcaaggtgagttctttgaggatccaagtgcctctctatgtgtcactacctcagctagggtccttggtccttgactactgcttcatgggctcaaagtggctgccacaatttctgtacaagggatgtcttattttggctgtcagctgcatggagagttgcctagaaagttggtaaagcaatatgtgtgtctctgaggacatttccagagactggctctgtcagccggtgaaacaagtagagatattatgggtgacaccacccagttggcccaggacctgaataaaacaaaaagcaaaagcagggagaatattgcaccatggtcaggctcaagtcttcttgagcttccgaagttttgttgctgccctcatcagcagacaccaaactcccggttctaaatgcagattcctactggctacgctccagggagattctaaatcaacagccctggctggacctatattgcttcactgagagtttacaccacatccacagttaggaaacagagcacactgcaaatgatatcattttcctgaaatcgcaaagcctattccccagtgacacacctccctaacaaggccatacctaacccttccccaacagttccaccagctggggactaagcattcaaaggtgtgaggggggacattcttatgcaaactaccacacagcattccagtcaatagcaggccacatgttccacagtggttccttcagactgtactgctctgtgtcttagtgtgagtgcactaggatcctcactcaaagataaagtcacctaatgttgcccttctcagaagatattaattactatgcggtacatgactgtgctttcaagtcaaggattgctgaatgtcttcctcatgtttcttctccagcccttcttcctcccacagaactagaacctagcagagcattccagaagttattccatatttactctgttttgggttccaacattgagcacttctcatgcccaaggcacacagatcttgcatcatcttggaaagacccataactccagtttcagaggatccaatatctttttgtgaacccatggatgccaggctcacacttgaaatacatacacaaaagcagaatgttcatacacgtaaaaaataaattaaaaaaaaccaaaattgtgtgtgtgtgtgtgtgtgtgtgtgtgtgtgtgtgtgtgtgtgtgtgtggtgagtgtagttgatactttcttacttgtagcaatactggttggaactctatatataaacctaattacaactatccaagaaatgggacatgacatacactcaatgtatgggacacaaattaatgcacatcattcttattattgaaaactggcttacccaggtatggcgatatattcctatcatcccagcactcagaatgctgggataagatgatcatgggctcaaggatagtctgggataaccagcaagactttgcctcagaaaaacaaaagaaataaatcaaaacaaaatgtaaataaagatataagtgactcagtactttttctcatttttatcactttttacattatattaagttatcagaaccagtctctaaaaatgtataaagcataaacatacttcatagcattgcagctacctagaacttgaacaggaattcatcccaaagtcctttgcttccaaactcattataattacttatcatcaatcagcagtttaagagtagggactttcactgttagatcttatctattggacttttcagttctcaaatacaagattttgtatgtgatgtcaagtgagaataaacctgttggatttgttaattagtcataatggttttttgatggagtccttggggtttcctacatagaaaatcatgccacctgtacactgacaatttgacatcctccattccaatctctgtcttgactgctctgcctagaactccagtaccagtagaatccaagtgaagaaggcagacatccttgtcctggcccatttctcaaagaaagctttgaactgttgcccattcagtatgaggtgagctgtgggccatctacaaccattagtatgttgagacaaaaatgaaataattgcctctaatcccaattattaggaaactaaagcaaggagctcatacatatcaggtcagcctggattacatagtgagttcaaagctgccttggtaacttagttaagatcttgtctcaaaacaaattttaaaaaaatttaaaaagactggtgtgggactgggtgagatgacatttgcctccaaaactggtgacttgagttcagtgtgtatacataaattgaagaaaaaacaactatgtaaaatggactggggctatagcacagagatagaatgcttgctggaggtctacagcaactacaacgggtcagactgagagaaaaagagctctgaggatgtcatatacaagggaagtgacagaccatgagtgtggctcagagaagtgggacttaaggacacggaggaacagtgagcctgccgtcattgttgacaccacactgagcctctaccctggtctaattcctggggctgaaacccataccaccccataaatttgcaggttctgctttatttaatccacaagacatccccgagatcacttaatgggatttttatcccttcctacgtcttattaacaagaaatttagtcaaaagagcttttcccccaaggaaaattatcaagggagagaaaaggaaggtcctcatcgatcctggcatatctacaagcctgattaaccacttcagtttggggactacgggagataaaggggcttggtctgaggttttctttagggataaaagatatttaagagcaaaaatagtgcttcaaataaaaaaaatagacttctactttaatgaaaaacttctaaccacataaaaacaatctcccggggctttgttgaaaactgttaaaatatattccacatcttactctttgcacaaaaaggcttattatgttccctcccattaactctctcctcggggtatttctgatgtctgcaaaacatattacagccatttcctgcaagttggttctgcaaggctgaaactgaaattccagaaacgactggagccgaacaagctgaacagggcttcctcatccagcactgggagacctggaaggagcctgctatggcggcatcaggctcttcccaggaattcctcttcacagagaaccagtagccccactgagctaattctacaaggccattttcttgctacgtctcacagagccctgtgtcatttctctgtccattatacaactccctttctcaacgcgttcaaatttatgctccttaagaagtaaggccttcgagcacggaggtggtggcacacaccctcaatcccagcactcaggaggcagaggaaggcagatctctgagagttcgaggccagcccggtctacagagagaactccagaacaccagctagggctggtgcacagagaaaccctctctcttaaaaactaattaaaaaaaaaaaaaaagtgagaccttcatcgcaaaggggtagagtccattgggtcaacactaagtgttgagtatcacattcattttctcatttgcctggaggaacagtggatcactgacgggggaagtgcttctgtgtatgtgtttgtctcactggatgataaacaaagtactgtttggccaatgaggcagcaagttaggcgggactagaagtcaaggaggattctgggaaatgtagtaaagaagtggtgatgcacgcaggaagtgacatagctgggagactcataaacaagggcaaggaggaagtggtcccttctctcttcctccagagccaccatgtgatcccaggatgaggacaccaatggaaggcatcctaaataagataagtcttataaaatatatagatttatgataattaagactgagctaacaaaagggaaatcctagtcattggccaaacagcatttgtacctaatataagtctctgtgtattatttggggccctaactcggcaggtagaactcaggcggctggcagaaagtgcccacgtggcagtagggctcaggtggcatttggtgaaaagatttatcgtaacagatcactctctaggaagaggatggaaggaagggatctggctgaggagaccatcgtgtgactacaccccatgcctcctttaccctagccatgacaacctttctgcccagggtggactctgaactgcttagccatttcaatggtagagatagctccagaatatctcagcttcaatacaagacacaaacagcattttcccatggatcataattttgaagtcaccttcttttttcattgtgtcccctctgtttcccctcctcttgacaaagtctcatgtaacccaggccaacttccaacttactgtgtcgctgaggatgaccttgaacttcagatgagcatatatctccatactccaagtgctaggattataggcgagcactaccatgcctggatgaaaactcggcttcagtgttacatcatatctagaaccacacaataggaaaggaaaaaaacctggaagcaaaatagtgttcattctggcttcccattgactggtacctataactgccacataaccagaaagagggacaacatggactagtgtttccatttgaagagcaaaaagccagtttccccacattccccagaggaagcagccactgagaatcagcagagttagctccaaggctgccttacacaaagctgaatgacactgagggcaggcagaggggagttgtgcttccaggggcagaagactgtggtgattttccatcattgtgtgagtgatctcaaaatagatatctgttattctttattccggccttcatgcacatcctgcctttaataaataaatgaaatttaaaaaaaaaatccaagaggcaggcaatggaaaagcattcaaagccaacagaccccaaggccagtggttatctctgcctctgaaagcatccttgctctttccagatgctctggaccacatggttcaaagggtattctgatggtgtggacatttgaaaaaatgagctattcatgacacaagtaaaaattcagaccctaccctcttggtagagcgccctctgcctccagctctgagattcaaccccatgccctgaccctgctccagagctgagttttctgcatcgccgaagcccagagatgctctgaggaaatgtgacagctatttaaaaaaatgaatttcatcattgcttccctttcatgatttgctactttgatgtattgaagtatggcatcctgtttttcttttggggtttggggatggacaaataacttgaactttataaattggccatttgtatttcttttgtgaattgtgaaattgcagcctaggatttgtctgttgtacatagcttcttagtgagtttataaaatctgcctgtgaacgcagcacagttgttgaggtcaggctgtgtccggctctaagttgctccacctccatggtgtccaacacaaaggtgggggcgagtttcaggttgagccttaccctgagctccattctgtagtccataattacagatctaccatgtgacatgggacccacataggagagttggtattggtaattatgattgtaataaaagagcccgtgtgcctcagccagattgccaaggatattgcctttgaaactcctggaccttgtgaatttgttattaatttacccaataaaacctgagattgtagacgaacagaatgccacccctctatgcatgtgacatatgacacgtgtgccaacagtgagtcactgggctggctggggccttctctacactttgtgtgcactgcattccacaggaagagcattgcttctgctgggcaacatcacctatttgtggctatgctagtttttagactaaatgccttctctttttcaaatactaattccttatagtccagatactaacagttataattaccgttacatttatgttttgcctctataatccactggaattggaagctcaaagtgaggcaaatatctggtttaatttttccaaatgcctgtttcacacacacacacactgttatgaaatagacagcttatttctcatccccttagtttaaaaaaaaacactcaatgaaaatttactttctactatctaccagacatggtgttaaatgtagattatgttggttttgagcaatgaggacatggatgcattaaaaatgaactataaatgattaaccaacattaattgtgcatgtatatcactacatgaatacaacttacaaaagaaaaataaatagctagctttaaaagttcaaatactctattcatcgtggaaaaccaaataaaaacatcaaaatattaaaattgtaaaaggaaggcaataaaattaaatctccatagctaatatgtttgctgagggtcagttccttggctgtgattttcaggaacccagttccagctggatctcagagactagaacagacgtggctacataggagctgccttagatagggttttcattactgtgaggagacaccatgactgtggcaactcttacaaagaaaacattacttgggttggcttacagtttcagaggtttagtctgtcatcatcacggtgggagcaagatggtgtgctggagaaactgggagtccagcatcttgcaggtaacaggaagtcaactaacagtcactctgagggaagctcaaaaaaagagacttcaaaggcagcgcccacattgacacttcctccaacaaggccaaatcccctcatagtaccaatccctttgggggccattttcttccaaaccacaagggccatggccaggaagaggtgtctggagcttctgcttagctcatggaatgtgaggaactctaactagttcatcactcaaagatctgatggcttcctttgtttatgtaaatcattttctctaaagattataaaaacagagtgctgggattaaaggcatgtgccaccactgcctggctagcatcatacttctagcaaggacttttcctatatgtttttagatttgattgctattcaaaatttaaaaaaaaaaagaagattgaattaatctgaaatgctcctaacaattctgctggggagcaagggacatctggttttggtcttaaaatactggctgcacttggggaaacaaagatattgggacctctagacgtaagcaatagcatgcaggtaagcaaagccaaacagacagcaagacacaggatgtgtttgcagtgatgggccaggagctgaactgaatccaccgagttttagagctggagaagaattggctggaacttctgattttgcaggttggaaacacaaaaatgagcttccacaattcagtgaaccagtaccaacatccagagaaatcctgagtgttctgaaatgagtccattccttttaattttcaattttccaggctttaacctctgaagtcctgttccaggtaaccgctctcatatttgcttgcaggggacttacatttttacgtataactgaacatatttatttatttacctatctacctacttatttataagatcaagctagtcagtattctagcatgcatagggaaggagctcatgaagcttcactcttagctgagaagctaccagtagctgatggcttgtgggggaggaagactcatttttctccaggactgactgtttgctcccttggttggctcacaccatgtaggcagcactaattagactcactgaagtactactgagaactggacataaatttgggaggagggtatgcggtagggggtctcccaagggtcttggaagagggaagcagggatggggggatgtgatcaaaacatcacatgaagtcacaaagaacaattcaaaatactatttaaaaaaaatatcctgcagtgaagtttgtgcgctagacattaaaatttgcctagtccccacgagtatctggcttttccattcacctagaaatgatgaatgatgtaagatttgccattctgtggattgcaaccaaaaacgcaggcaaacaatgttttcacattgttgttaggcattgggatgaaacagcagaagactgtcatctctgagagaagggaatcagaactaatggacctgtaagatttgcagagttaccgatgaatatttaacactcaaacaggctaaggtcataaggtcagagggagaaacaccaagaagagcagcctgaataattactgcaatgcacacagacctcattttcctattaacttgcatgaaagcccttggggttcaatggatactgggtcggatcttcagaaagactacatcatactaatagtgctaattcagctccagagtgaaaatttctctaaactctttagagcaaagttgaaagtaagcatcaaaagtatcagagtaatccacaagcaattatccacagaaaatagtttccaacccaggcacggtggttgattttataatcccagcacttgggagtatgaagcaggttagccatgagttcaaagccagcctgggctacagcaagtttaagggcagcctggttacaaagtgagatcgtacctcaaaaatatcaaaagataaagaaacagagtagatagaaggagagagggctctaccacccaataaaaactaacaccaaatataaacataaaaatcacaccagttcttcacctagaaaaatcaataggaaaagaccaagagaaaaaccaatcaacagaaatagatacagaggtgatagaattggaagaaaaggacctctagaaaggaattatagattacactaattataaatcttgtaaacataacgaagcttctctggccaaggctgggagtggcattaatttatgggattaattgctggcaacgctgtcctgaattggaaggtgaagttctcagatccctttggctctggtaggctccgggtaatgccatggtgatggaaggagggttaatcttgactgtcaacttgattggacctggaatcaactcagagacatgcctttgtagagtgtagggtctgtgagaaaattttcatgggcggggtcaactgagagggaaaaccttctgacagtggcccgcatataaaaacgtccaagagaaaaacagtgctgctttgcctgtgagccttcacctcttgcttgtgagtgtatctacactacagctggccttgctttcctttgttgtcatcagaacccagtttcttcagccttcaatgccacattgtgactgacactcatgcagcctcatgtactcagtagctactgggcccccagccactccagtgtagacagcaatcgttggacagtcaactcatgttatataagccaatgtattgtgtccttttgtaaatacatgtccattctgtaggtcctgttctcatagaggacaccaatacatagatcctatctcaaagcaacaacaaacaccaaagcatgtaataatcaaatttctgaatgtatgtattaaagagaaatctcaaagctgtcagagaataagtatatgtatcgaaaaagaaacaaaatacaaaagccgcctggttgacttatgggatgggctgcacttagactgactttcagcgtcacctagtctgctggccatgctttaatgccacacaccatcagatcaggcagtgaagagagttccatgaaatttattctaggcgtcattttccccccaagataacagggcaagtgtctttccacagcccccaaacatcaagtcttatttaagagagtctgctggcaaacagaacttttaacatcgactgcagaacagattacatctgatgtgtgacctctcatgggctgtctttgtaactaaatattaatcttggaaagtattcatatagaccttcctagaatttatgagactgttggaaagaaaagagaaaatttttacaacgttttaagtactgaagtgttaaccagtcatttgacccctcttgtctattcaaaaagtaaagtagttgagacaagcatgaaaaaataggaaggtctgcccctcccatccctgtcccagagttccagcacagccaagctttctttggaggatatatacctccttgtgttctctacccccacccccaagcacgtagcactgagctcataattgggttttatatgcctaagacacatagaaacatttctagtaaacatgaagcatcccacagctacaactcctttcttttattttcctttgacttaataatttctccattaggggctggagagacgacttagaagttaagagccctcgctgctcttacacagagctcaggttcagttcccaggactcacatggcatttgggatgagaaaacacacacgtgcagacacacagaaaacagaccctctgccaaggaaagggggacctcaagaagataaaaaaaaaaaaaaaaaagtccagtgtctttttaaggtctgaggtttgttaagtctgtgaagagttttcctcccctaatttagggttggtctgtttgaagagagataagataattgattggctcacaacagttgtgtaacatcctgttccagccttgaaattgttgagccagtccatcagcacaggacctgttggtgggaaacaaaagcctacaaggcctttgttttaggctatcatatttttgtctcaggtcaggaaggtgaggaagaagccagccatcttggaattttgccaccttggaagtttaccctctttattattcggccatgttccttctgtctgtcagcctactagggagtctatctaacacctggtgtctcattagcacagcccagatctagtgatcctattctttggaaatgaaagatatgttgtttgctatcaagtgggtgaaaaacagtagaaaagaaagacgactgccttggtttgttcatctgtttatctgctattataacagaataccaaggataggtcatttgtaaagaacaaagatatgtgtctcctagcactaggagaacagaaagtccaagtctggggaccaggcatatgataagtggttgggtttctgtttggttggttgtttggttggttgcttgcttgcttcaatatcccatagcagaaagtttgaggtaggcaccaagtcatgagagagtaagacacgggaaggcaagcccactatctcacagcaataagcctaatctcatgataaagacattcattcattcatagatcagaggacctatgacttaattgatacctgaaggtcccagctctccatgctgatgtattgaaagctaagttcccaataatgaaccagcctgcttccatcttgggcttgaaagccatcttataataaagacaaatcaggttcattcctgttcatcattaactctctgtttctcaaggattgagctatgccccacctgtaaccttaactaaaaatggttctgtattacctgttccaggaaatgacaatcatgtctttgtttcaaaaagttattatgaccatattgcaaccctatttttgcttcaaatactgttgtgactacattgttatgaccaacttattgtattttgcttctataaccccaactatttgcctgccaaatcccccatttgggaagcccttacccctgagctataaatatcattatctttcccttgtccaaagatgaccatgtgaaccccttcttaggggaaggcagcctgtgtgccttaggggaaggcacataaattttaaaagtttgctttaaataatttggtcatgatgatttgggttggtggtttttctcctcacaccttgggattaacatcagcacatagactcggggatagactcgagccaatacagttgggtttgtattatgcacgaatgtgaaggataaacaggtggatgcccaatgttgtttgtaaatccacatttggattttcccattaagcctattcagcagtaatctataaagggtataaaccagtggttctcaaccttcctaaggctgtgatcctttacaacagttcctcatgtcgtggtgacccccaaccataaaattattaaattgctacttcataactgtaattttgctactgttatggattgtaatgtaaatatctgacactccatgcctaaaggggtcacaacacacaggttgagggccactgctataaactagtccatcattttcctcctggtactcagcattgagggctgtactttgtttggcacgctgtctgcacctaccacacctccctttaagatgggtctccagtgttattcccccccagctccttgcaccaggtctttccttcctaatccttcctcctgattttgaggtacccttcttatcagccacctgaaacagaccctaggggagcgtccctcaggtgaaatgcccagctggattagatgggagcattgtctctgcagttataggaacctgagtctggccctgttggaagacaggaagctgtgctgagaaaaacccagctgtacaccaaatggcctaataagggctttttcatctgtagcttcaaatttagaatgctatttccagtcctacttcagatccaatttgttaatttctccagataggaataaatctcatttagctgtttaagaggccagaagggtggggtctggggagatttgggtctgattgcacacccggtgctccatattcagagtctccacagaaacaaacctagtgacaacagctgaacgtgtaacattcacacacacacacacacacacacacacacacacacacatacacacacacacacacacacacacacacacactcacatgcacatgcacacatgcgcacacacacaggaagaaaagccctatgtgcacacttgctgtacagctatggaatgtctatgtgttatgagacttttataaaagcacttctttggcttagactaggccaaattatttgccaatgttaacccaggaggatttttttctatttttcacatgtggcatgtttgtgttcataagtccatgcatgggtttatgcctggtgacatgtgtgcatgtgttcatatgcatgggcttgtgtgtggtgatatgtgtgtctacggcatgcatgtgtgtgtgtgcatgggtttgtgtgcactgactgttatgtgtccatgtggtgtacatgtatctatgtgcatgcgtttatgtgtggtgacatgtgtacatatgaaagcccaaggttgatgccaggaatcatcccctgtaattcttctaacttttgcattgaggcaaggtctctcagttcaacccagagctcagtgatatgtctagtcttcatagccggcttgctctggggaccccctgtctctacctaccaagactagaattatagataggccaccacatcaaatcaccatttgcatagtttctggggatctgaattcctgcacaaccagtgctttaaccactgaacaattcccccatcccaaagcccagaaaatttatcatgtggttctaaaatatcagttgagctctactacattgctcagttgtattcaaaacgcagtcatgtgtaggagagcaagactagacacaaagatcactgacctggcattcttatggaggtgggcttctgtcatccaaatttaatcacatttcttcctaagccaactctgagtctgtctcctcaggagatgcaagctgaatacaagtcccatggccccagcattcctgctaagtttatcttcccatcagacatgtcaccagccagctatatagaaaaggacatactgggtccttggaaaggctttcttataaagtccatctttaagagggatggctcagcagttgtgctggctagttttgtatcaacttggcacaagctaaactcatctacgaggaatcctcaattggaaacctcagttgagcaaatgcctccataagactgggtttgggcaagcctgcagagtattttcttagtgattgatgggggaggcccccttgtgggtggggccacctctgggctggaggtcctgggatctataagaaagcagactgagaaagccatggggagcaaccagtaagcagcaccctccatggcctctgcatcagctcctgccttcaggttccagtcctgtttgagttcctgtcctgacttccttcagtgatggacaataatgaggagatgtggaagtgtgagccaaataaaccctttcatctcaaacttgctcttggtcatggtgtttcatcttagcaacagtaaccctgactaagaccgcagttaggaacactcattgctgttacagaggacccggattagattcccagcacccatgtcagacagctcacatccacctgtgactctagttccagggaatctgacacactcttctaaactcctgcgcacatatggtacatgtaaactcatgcattcttacatgtgtgaataaggtagatgattaggcacacatacatacatacatatatacatacatacatacatactaaataaataaatccttacaatgcttttgtaaaaagtcagtcttcaaatggtatctgggaacgtcacaattgttcatccagccctacatgacaagagtggcccactgtacctaaagtgcctaacagaaggtttcttcttggcatctgccattcttctggaagtctgcagtcttggtctgtgcttggaaatgagtgcttagctcccaataaaacccgtgggcaccaagtctctaatgaattccttcataagcaatgtgtcacaccatgtgttttccctgtgtgtggccgggaagtcaagcatgtccccagtgactccacagggagaggaatcagaaatgcgtgttgactttgtctgggctccccgtgggcatttcttccttttgctggttaggttgacagacacatcaacctatctgttctcacagttttgttttgttgtttgtttttttaatttgggaggtgctattacactgccacattgttttgtttctttttccatctatatgatgtgtatgtgtggcatgtgtgtatgtgcatgcactttgcatgttaggggtgcattgaatgtgtgtgcacatgcacatggggaaggggcgcattgaatgtgtgtgcacatgcacatggggaaggggcgcattgaatgtgtgtgcacatgtgcatgggaaggggcgcattgaatgtgtgtgcacatgcacatggggaagccagagttggtatcaggaatcatcctcagtgtgtctcttactcaatgagccaaggtctctcaatcaaacccagagctcactgatatgtccagccttgctaataggttgctctgggaacccctcatctctaccctctgacgctggaaagataggcaggcacccacacccacccagcatttacgtgggtttctttaaaaatgaagctgtcccttgtttatgtctttcaagagcgcttccatcttgtacagacactcattattcttggtccttccaaaaaaagaggaattctgagatcggtatattctggtctgtttctttatatccgttcagtctggatgccatgtttcaggaggcacgagtgtgactggaatctgaatgtataagggacatgattctgctccccagtgccctgggaatgctttaaactcctggcataataacagaactttttttttctagaatactcagattttctgcctaggctttgaaattttattcttgccgggcgttggtggcacacacctttaatcccagcactcaggaggcagaggcaggcggatctgtgtgagttcaaggccagcctggtcttcagagcgagtgccaggataggctacaaagctacacaaagaaaccctgtctcgaaaaaaaaaaaaaaaaacaaaaaaaacaaaaaaaaaagagagaaaagaaaagaagagaaaatttattctctatttttaaattttaagaatgtgccaaagtccatttgtcccctcactctcctaccccagtcttgtataccttctgctgtgttaggtctgaccttgatcacatcaacacttcaaaggcttgggatgcttggataaggtggggctttgtctctttagcagagtccccaaagccaaaggacctcatcacactaaccctaaatagattcctatttcaaagtggagagagtggtacaaaatctagatttgatgttctgatccactccactgggatggattcatcccttgtcactacagagccaggctttctcagatggtccatggcatcatgccagcaaggctactcacaatcactggtcaagaggagacaccaaagcactaggacctttctagacaacacagacaattcgttcctttaaatcttgccatttaatctcagcgaagggagtctggccaagaagggagtaaacccagaagacaagaagtcaaacttcaagaccatcagacttctacctaaagactagtatcatctgtgcattggcaggatgagcccctatactttcaatatttaactaaaggcctatgcattgaaggcttgatcccaggggtgggacttgagagcttgtggaaaattctttggtcattgtgtgaccctgaagggaactgagagacactggttcctttttttttcctgctctgactcatgaggaagtcagaatattcttcctccacatactccttccatccttccgtagtctgctttcccactacaggccacagcaatgggataaagcaagcacagattataacctccaaaaccgtgagctgaaatcactcttttctctttatgagttatttgtctcaggcattctgctgtagcatcaggagatcctacagagcctatgccttccagaatcttccatgccaatatgcactatctgaaaatcagaaaaggattctatccaaaaacttggactagaaatatagctctatggtggagtgtttgcctaacatctgtgaggccctagattccctctcccacaaaaaggtaaaacaagaccaaaacaccctgcaaatattttttcctggctccaggaagccaagcataaacattcttggttttcttttgtcctcgccatcccagcccagtgcctgaggataagtcagaatcttaccactgtgtccacttccctgcaacacaggcagaggaaacatcaccagcccattgggcccgagagacattgtcctaggtattaggcattatagaaacccaaacaatgctctcattgactaaatgctgttctagttcctaagaggttgtgagacatagtaaatgcatccacccagttgctgaaaaggtttctttcatacgatgtacaaaatgtgttgttagtcattggaggcattgtaactcatttaaacacatatctgaatgaatcttactattttatctgggtgatgacatgatgtttagaatgtacctgaagccaagtctagcagataatatatatattccttcctagactggctgaagggctacactcctaggtctcttttttttttaatttctcaaagcaaacctctccttggtttcactccaaacttttaaactttattgacattgtgtcaactttagctcaaacctcaccacatggagtagaatatccagaaatggcttacacatgaaaatcattaagcattggagcattccagcaatccactgacaaccttctccaaagggatgtttaatgaaacttcccctagtcttactgccatgagggcagactcgtgtgctttcttgtttctccattcctaatagagacaattcagggttctggaaatgtaatagtcaaatatattgctgccttaccaagtttttttttaagattgaaaatgttggacaaagactactaggtgttttagatgccagtgtgcttgactttgaatcatttacagtctagtaagaaatatagtgtgtgtttatgttcaaacacgcatacacatatatactgggaagtttccaaagttggaacttgagaatgtaggtagctggtgtctatgaaagacagcaaaaatcacgagagaagaaaagagaaaatttattgagcatttgcagagtgcagtaactatatctcatggggactgtctcctctgatcatcacactaagtcttcatggtcaagagaaacttggttgtgaatcaaggctcatagactcacaaatactgtctacctgttgcctaagatggcacactaatgacgcacgctgttacactcattttatttaggtgttgtcctctgtatcacagagactttccactgcaaatgttcatgtacatatattgtagactagatttcctcttgtgctgtcagaatatcctagaggtgagggtatccacactgcctcaaacaaatggttacagtttccacactggctgatacagtcaaacttcaagtaagtcacaagaaaataaagttataatcagccaactggaactaatttctgttcctgctaaaatggctccaattacctgcttactttatttgccttttcaggaaaacctaactaaatagtagaggaaaactatggatactttctatcaaaccaaatccttttgcaaccccaatataataagcaacaaaatgaaactgctccaggggaggcaaggtagagctagatggttttagcctggctctgactggacacatgacagtccccaagcctctgcctgtgactctcttgatgccatagagtatggctgtagaaacaattagcatgagagctactagactatcagaaaataacacagccaggacttaaactccccagaataaacaaagcttccgatgctgacctcaacagagaggaagaaatcacaacaaacaggacaaggctaggttctaatttctttaatcccttaactgaagatagatagcagccaggattccatgcctaaagtctatgtccaaagcaattttctacaggtatggataacagggaggaaatttcaacccgttcatcacaagtatgaatataaaaatgaacttgatgttatcctcattaaagtatcaatttagactatatcatttcaagtgcaatgaagcagagctgaaattagaaagttaattatgattcattttattattctgatttggagtttacagctgcttagaaattaaaatagaagaaaagagagaaacaggagactatagttgggtctaaaatcttctccagatgggtgtgttcaaggctggaccccaacagagtggaacttataagaggtgatgcctaatgaaaacgaagtcctcaagtcacttgtgtatcccctggaggggactgaggaagccaggccccttctttccctcttcagtgtcccaacttcaccttgccatgagtcccctctagtggtgtgctctcactttaggccccaaaggactgggaccaactgacggtgggttgaaatttccaagatcataaagccaaaataatgttttccttctctgtaagcttattgcaggtatcttctgtgttgaaaaaaacctgactgtgactaaagaacaaccagaactctggagagcctaggcagtaagtcggaaagcagggcctccattcaccgtgagaaaatatacaaagaactcagcttcacagaagcaggaagttggggtctccgtgggcccatgtctctgacagtgttgggtaggctacggctggccactggagacttaatataggtagaaaatgagcatgttgccttggtggtctccaagtcattagcatatattttctcctagttgagttcccaacctgtcttttacatttcaaataactcaaactagaatgagccacggagctctctacataagtaaatgtaaataaacaagaaggctgacactgccactaggaaaaaaaccaaaaacaattagataaaccaactacttattaatgaaaccgaaatcattaaaaatcagagaaataaagtacaaaccaaatgatgcaactttcaaccaaatagactgcaaaaactttaaaactgaactcagcccaaacttaggcaggggtgtgggattttcatctggggtgatgagaaggacaaaattgttttcacttgaggtctagatggatacagagagctggggttggggatgtgaaggaaaatgcagagttctagtttgagcaccttaattttgaggtgtctataggagagccaagcagcagtgccaggcaggagactggttatgcaagactggaaacagttaggatttaagcaagagacataaactgtgaagatggcatctaaatccatgagctcaccaaaggggtgagtgtggatgacaagagaataaggtctaagacagagcaatggcggctccgcagctaagagctctcactgctcttccaaagaccccacactgagcggctcacaacctcctgcaactccagtcccagggacctgatacctttctccagtgcacagacacacacacacacacacacacacacacacacacacacacacacacacacacacgtgcatacatacaaaataaataataaaatgaattctttgttttttgtttttgtttttgttttagttcaaaagctgacagctggagtttcccaaattcactggaagagttgaaggagagatgggcaagagactggaacagggctgtggggagtgaagagcagagggtgttgtcacggcaaacaaggaggggtaagtgaccatgctcaatgccactaacacgtaaacgatacaaggactcagattttgtattataacaatgtaaggactttgtcattagaaagaaacatacagatggcatcagaagttctgtggaagggcattgtgtggctgggacatggggcaggtggatggcatttcgctagactatcacactatggcttctgcgtttctctccatgtgaatgtactagccacatgaacgtatactcgtagacatttacttgttttaaaaacagcaaggggctggatgcagttcagtgatctataagcgcttgcttagtgcaggcttcctggcttccatctccaacactagaaaaacatttaaacttgtaaaacacagatcaggccgaactgaggagataattaataaaacacatgtaaaaatgtgtacggtcctatacagaggtgcgtgaactatgaaagggaggtaaggtatacacacgtaagtgagacagtgtgttatatattgaatctgctcttcaccaagacagaataaaaactatagttagaggacgttttcaaaaatacgtggattttatctagtataattaggtaacatgacctgcattgaatacagtattggatatattggcaaagataatggatacccaagatattccaggcagaagggctgggagggtccatgctcaaacctagcatagttgatgtggcaaacagcgaggacagagtaaagattcttaaaatggccagagaggaagaacgggccccctaacatagaatggcaaggatgacagtacattccactaaagcaactgcagattcaaaaacacactgggatgaaatcttcatcaatgtaaaaatatttaaccggcaaaattatgcttacaaaagagagcgaggtcagtcatggacaagcacacagaatgggcagtgtaacaccaaaatctttcactcttttgtgcatagttactttcaataaaggaaaatgatgggcttacctgtgtaagaaaagagactgaaggagaaatgcagctaagttttgaggtttcaaggggtgcgtgcctctcccaagcatggcatccaccaccctccaaaacaagaggaggtaggcccttagccttgactggggctgaatctgggctcagttttctttcaataaaagaagtctttttgttgtagaagttttaagccaggcaggcaggccttcactgtggagtactatacaaaaggaatggtcctctttcttggaaaaaaaatccgaaggtaaattctgcaccttcacaaagtctgaattatttggttttcttgcttttgttttaatttgattatttgatttggtggcagggaagagcttcttccttcaacttcatactaggaaattttttttaaagatatgttttcatatattccccaggggaggaggagaagtgatacagttgacatataacacaacagcatggaaatatgcagagatgtgattgaaaggtagatctaagaagatcccagagggaggcgtagagtgtaagcagaagtctgggataaatacacactaggctaggaaacacactgatccagaaggggacaatagacagcacaggaagacagcttctcctctgtactcagtggctagcagcatccagcactaaagagagcccatcactatcagacctgctatggctgagctggcctctgcctttgaccctatgacccagcatggctctgggaacacagcatgacgagtcttgattttctttttatctttctgttgtgtatctatcctcactcttttaaaacaaagcaatcaatcacattctagttgcctcactagtacctagaccagacttttccgaactctaccaacatgacactcagtatactgtcgctggtagaaggtggctctgaacgtaccactgatggcaagtttgtgggatgagggaatctgcactttgcgataggaccagtttggtacagatgtttatacaacaccaggctctctacaaggctctctggaggaaaaagttgttacaacagtttctgagacctaccctgcagtatcacttactcttttcatttctaaaatagctttaacttgaagccacaagtgaatgagaacaaacaccagaataaagcaccacagacattagtttggtgaggagaaaggtaaaacaacaaaacaatgacaaagaatcctgagccactgaccatcagtgaaataaaaactgtctgggagctcataggtctagaaaacgtcagatgtcctgcaaaagtctcctcctcacactatgccgccaaatgcctaagttgtgatgcaaactgataagccttggcactcacatgggtttctcatttttgcagtctctatgcaaactcgaagtgattcctcctgacaacactccttggagagatactggtctggagccagccagagtgtgtgcgccctcgtgccgattgcataagttcacacacactcccatccctttcctccacaatttcccatcatctgtggtttaaattctcatgacaggttttaggcaaattctgctcttcaaactgtgcctctgtcccctccaggattatgtctctcctcagagttactggctttggttttatgttccaatgtatcccatgattcccatctgaacttgaggaagtttaatggcccccggatcctacatactacgcaaaataaacatccctccatgtccataaagtgataagtcacatcccgcctttcaggatagttcccacaaaatagagtgaagcaaaatcaaacacacacacacacacacacacacacacacacacacacacacactcacacacacacacatacacagacagacacacacagacacacacacacacacatacacagacacacacatacacacacacacacatacacagacagacacacacacacacatacacacacacacacactcacacacacagacacacacacactcacacacacatacacagacacacacacacagacacacacacacacacacacatacacagacagacacacacatacacagacagacacacacacacacacacacatacacagacagacacacacacacacacacacacacatacacagacagacacacacacacatacacacacacacatacacacacacacatacacacacacactcacacacacacacatacacagacagacacacacacacacagacagacagacagacagacacacacagacacacacagacacacacactcacacacacacacacagacagacacacacagacacacacacatacacagacacacacactcacacacacacactcacacacacacacacacacacacactcacacacacacacatacacagacagacacacacagacacacacacacacacatacacagacagacacacacacacacacacacatacacagacagacacacacacacacatacacacacacacactcacacacacagacacacacacacacactcacacacacatacacagacacacacacacagacacacacacacacacacacatacacagacagacacacacatacacagacagacacacacacacacacacacatacacagacagacacacacacacatacacacacacatacacacacacatacacacacacactcacacacacacatacacagacagacacacacacacacagacagacagacacacacacacacacacacacagacacacacactcacacacacacacagagacagacacacacagacacacacacatacacagacacacacactcacacacacacactcacacacacacacacagacacacacacacagacagacacacacacacacagacacacacactcacacacacacacacacagacacacacacacagacagacacacacactcacacacacacagacacacacacacagacagacacacacacacatacacagacagacacacacacacacacagacacacacacacacacagacagacacacacacacacacagacacacacactcacacacacacacacacacacacatacacagacagacacacacagacacacacacacacacacacatacacagacagacacacacatacacagacagacacacacacacacacatacacagacagacacacacacatacacacacacatacacagacagacacacacacacatacacacacacacacacagactcacacacacatacacagacacacacacacacacacacacacacacacacacatacacagacagacacacacacacagacacacacacacacacacacacacacacacacacacacacacacacacacacagacacacacacacagacacacacacacagacagacacacacacacacacacagacacacacacacacagacacacacacacagacacacacacacacacacacacacacacacacacacacagacacacacacacacagacacacacacacacacagacacacacacacacacagacacacacacacacacacagacacacacacacacacatacacacacacacacacacacactcacacacacacacagacacacacacactcacacacacacactcacacacacaaacagacacacacacacagacagacacacacacacacatacacacacacacacacacacacacacacacactcacacacacacactatctcctcaccaagagaaataaaaggaaactcacaacaatgaacacaactcgctcctcatttctcttctgttcctgtgatgaagtaccctgaccaaaagcaacttagaggagggaaggtttgtgtcattgcaggggagtcacagaggtgggagcttgagacagccagtcacatcacattgtggccacatctaaggccagggaaaaacaagcatgcccatgtggacagcctactgctattcaaccagctttcttcactctaagcaagttcaggttgaagcctacaaatggtaccatccacactaaggcaatcaggacaattccccaggcccatctgagcaacatagccagtccctcatccaggttctcccccaattgcttctaggctgtgacaagttgatattttaaagttaactatcacaaccccctttttttcttttccatcatttttcatgagactgccttatttgtaaaacactacaccatctgtctgaatgtataagtcagatcttttaactaatacagagacaagataaattatataaagtcactgacgagactggaaagaaggctaaatgagtaagagcactttctgtgcaagcataaggacctaaattaaaattcccagcactcatgtaaaaagttggtcacggctatgtgtgcctgtaaccccaagactatcagggacagaaataagaaatcagtggggcttgtagaccttcagactagctccaggctaagtgagagaccctgtctcaaaggacacctgatactgccctctggcttctatatgaaagctgtgttaagtatcctacacacacacatatgtacatatgccacacatacacacacaagctactgtagctcaaaccctaatgggttctagctatgctagaaattcaacctagattgtattgcctatacctggttctataggacctccctcttacacttctccatgtctgacaaattcattagatagctgacagcagttaaatgaagtgccctcctccccccaaaaaaatcttaaaatacctataaaacattgaaaaagggattgtcacatacccaatgatgtggagaggaaatccccagaaacagggtgaaagccttgcagaactatggcaacagcaattaggtactcacaattatcccccaaaatcacatgaaaacttaaagtcaaaggaatgtaagtctaaaaatatcaaaatcatagaaccaagatttttttttgatttaagacaataatctaaggaacaaagcaagaaaggaaaaataattaagtaggccattttaattaaacccaccagaaaacctgattttacaacctcatccattctataaataaggcttcatgttaataattgaacctcaaccattcccagctatgggctttagggagcacactttaacagcccacttataatggctataaattcctcaggtaagacaaaattaaatggtcaccaaccactcaatatggaagttaatgactctctcaagtctcatctcatctttaaaacattgctgtcttgacattctctcattttaatatgactttggaatctttgaaaacatcagagggcctctctctggggacagggctcatcaaagataacatgtgtttggaagtctccgtgtttcatctgcattcctctcccatggttcttgatgtggatgcttcactaacactcttgtcttgtcaagacttcagttgacagaagagtagataaccatgataagttaagactgagaaaaaacaattaaggcccctgggaaacaagaactcccatataattgcctccacagtcaatagagatgcctgtaaccggtactcatatccatgcccatgcaaaacttatacaacagaacaaaatccagatatggccagtaagcagaagagaaatttgttttccaggtaggcactagtatgagttgggtgagatagcaatacactgaggtctgggcaatagtcttactatgaactttgatgctaaaagagaaataaaccaatcccaatcctgcagagtgagggagtgctccagcttgagtgagggctacatcatcacgggctgcggtatccatggattacatcatcacgggctgcagtatccatgggttacatcatcacgggctacagtatccatggattacatcatcacgggctgcagtatccatggattacatcatcacgggctgcagtatccatggattacatcatcacgggctacagtatccatggattacatcatcacgggctgcagtatccatggattacatcatcacgggttgcagtatccatggattacatcatcacgggctgcagtatctatggattacatcatcacgggctgcagtatccatggtttacatcatcacgggctgcagctcaccctgggctaccagaaacccacagcagaaaaacaaattcattcctcaggctgagggatcagggctgaaatgttgacctctcagtgtctgccaagcttaagtactaagccaagaagcgtgtcatgtataacaagagtctgcacctgcagtgggctggagaccatcaaaatgcagttgcctcctgcccactgaacctctgaggtgaagaacaaagaagacttataggtgtcttatgtccaggaaagaccatgatgaactcacagctgcttctccctcaaactccactccacacagctccttcaagccaggtgtggtggaacacctctttaatccccgcactagcaggcagaggcaggtggatatctgagttcgaggccagcattgtctacagagtgagttctaggacagccaaggctatgcagagaaaccctgtcttgaaaaacaaaacaaacaaacaaaaagaaaaagaagaaacaaatgagaaagagagaaatataccattaagtcagtagctgatgtctttagcatcttaagggaacccaattatccttttcatttcacatgttatttagtcaattgtaaggcgtgagtttttacattttaatatgtcttaaattatgattcatatagtcatcagcaatgctccacaaccactgtcagccagagagttcatggcagaccacatgtgaacacacgtggacttgtggcttgtctggacggctacagatgataaaggtttccatctatacagcattgaaggctcacttggagcagcctgatttcctgattgttattttctgtaaagacacagaaaatggctacattaaaacatgtgggaaaggtgagaaaacacaagacagtaggtgaagaacatgagggggccttcttagggtgtggcaggaaacagtgaatgtggataaagatatgaaaagcagaaaaaccaaaactcagtacaaacgcagtgctaattaattttgcttgtgtcttcctttccatgggctgtacacagtgatgtgtgtatatgtaatatcaagcattctaaatactgaaataatttaaataagcctctaatatctaaatacatcttggaggatactttcataaagtttaaaataaaatttctgccgttttttgaaacttatacattatatacatgtatcaagtgctcatgctgaacctgaaaaataaatataaatacatgttagttaaaagtttcaaataagaaattaaattacacatggcataagtagcagtgatatgtcacaatttgtacaaagttgttcttttttggtaacatacaaaatacagtagcttaaatttaagagaattttaagcttaatgaaatgcaacagtatccccttttgtgaggtctataattttatttgaatctctccagcagtcctttcttccaacttacaccccatttttcacttttcaaaagactgatgacctccctaaagtgactcagacacatggcagagaaagttggcactggcaacatctatgcttctcttcttattccagagaatgggacacaatgacaaaccctggcctttgtaatgacatgaactcatgtgtaccagtcaccaccgatgaattctggtggaactgatgtatgccacctccaatcacttgcatagtaattttaactcaaccttgtgaccctcttccaagtggtctaatggtaactcccagggcaattttgaggagtcccagctaaccatagaagacccccatgcataactggcatccttgtctgattggaacaagatacccctaactaccaatgcctgctatgctctgttgcaatacaggctttaattgtgttaatccattgagatatggcatgttttgtgtgttgtcatagttgttacggtggttatcttgcccccttctctggtgcttcttctcccaaccattcatatttacaacccttctttttatcatgtagatctacacttatgacacatgttcagaagaatcatccctggccttcctagctctccaatccctccccctacttaattagctaccttattaactacctgtcctgagttgaaagcaacacaggttcatgatataacactcaaggcttatttgtttttttatttgcgatgagatgcctccacaagaagtactaaattcttttgtctattggtgtgcccctgtcctcctacctatacccagtataaatgagagtcttcaaaaatgtttcttgaatgaattaatgagtcagtccgtgatagaagtggatcaggtgaagtctgtgtgccaggcacgttaggcaattctaagccacacactgattgagtggcatcccaaagcactaagcaatggcaaaaattaaactggcccagcttttctgagatttcttttcccagagtaccatttattcttcttgtacaaatttgatgatgttctcaccattgttgcagcaccaggaaagtagaggcaggatgactgagttcatggcaaacctaggatactgaaagagatcccagagtgatcactgggaaaccagcatggaactggtccagacccagtgaatgtgggtgtcagtgaggaggccttggaaatctatggggcctcttgtagtagatcagtacttatccctagcataggaatggactttgggatccaatttcacatagaggggtactccctgagcctagacactcaggggtgggcctaggccctatcccaaaggatatgacagactctgaagaccacctatggaaggcctcaccctccctggggaacagaattggtttgggataggtagggtgttattgggggtaggggatcaagggagggagagggaactgggattgacatgtaaagcaatcttgtttctaacataaatttaaaaaatggagaaaaaagaaaaaaaattatgatgttctcattagagaaccaaattcaagaaatacaaagttgataaactactaaacatcatttgtaaatcttcaaactccaccaaaggaagacagttgactgtgggccatcatgtcttctcattcatcctaaaatacactccaagtttgcttccctgatggaaagaaattgccccaatctagatggccacacttgaggtgccctcagctcctactctagcaattgggtagcagcattttcatctgaataaagaaacactcaagacttcgagcaactaccatgactctatttacctccttcctctgtcccaaatgcccaaagtcctcctaactccaagacacaacaaagaaataattctgaaataaatggcccagagtcttgacactcccagaactcttaagtgcagaaatgaaatttcaatcttagggcttatttgacctccgctatcatctagtgtttttgtttccagggctgggcctgggtttaggaaatattctgaagttggtaaacacccatttttgtgactttctttagccctagttatgggagccagagatcagaactgagtgcctcctgcctgcccagcctccagggtagcattgtatatactaggccaacagtccccacaattgactcccagaagacaaatggtatgagttagactcctgcgagtagctttatgctcagggaaattatggaatccttcatcagctgcatagaccccatagattcacattgtccaagtacatatgaaacatttgggaagcccttggttctttgtgttggaatctcacaagccgaacaatgaatctgaggttatttttttcttaatactcattaatattctactgacttactgctccctgagaaacatggctctagatccttaaaatcctacccccaccccactcccaaccacccccaagtaaacagcgtgaacaatgaaatcaatccacgctctgaaatcatttactcccctgatccaatgcagtgcagcattagtgcctcgttcgctgatgcagctctgaccagcgtctggtccccctactgcccttgaaggctccaatctctcctctccctggcatctgtgcagctccttcagccagggccagcagcacttgtcttttaagagtcacgtaatggctgtgacctgagctatctgaagtccgtaattctctcctggtgttccaacctttcactctagattctaaatgttccctgccatttaaataattgcctagtgaactacaattaatgaaatgatggaagaagttaggatcactaacaggccaggacagaaatcacttgtggctctctaatcgattctaattacctctgctaatgaaatgagagggaggggtcaagataatgcaaagccatcttagccagaacttgcagaacctttgtgagtcaaacccagtggccccatctgctctcccacttgagggctaagggccattgtgggattgactgacctgcaggacctcacccattcaacaatcagagccagctggtctgaaaatggcagaagctgtagatcagaccagatcaggatgtgccaactgatccatctttcaggaaaatgctagagatctctagacagagacaaggcctctatagaattgccagacagaaacaagaaatggctgctgtcctgaacaaggtttgcctttggacaaaaggcgttagctatttacccatattctctgggacatgtcaaattggacaacagacatagcctccgaattttagaccctagaatcagaaagaaggagagacagacagagagagagacagagagagagagagacagagagagagagagagagagagagagagagagagagagagagaacagatcttatgctgttcctcagtctgtttctaatctgttttgagtcattgtccaccctcaactcctttaagggtttgtgacttggctgccttccggatggctgagtcacactatgatggattaggtaatggtgccatcttccatacccttcagaggacaccctcaggctgaagctaacagtacaagttagaagcgtgaggccagtgtacatccagtgcatagtggctttcagagagaccccatatatcttagtcaattttgcattgttataacagaatataaggaagccggaaacttataaagtaaacaattatttccacaatggtaggacctgggaagtccaatgccaagatgctgacactgagcaagggctttttaggactttgtgacagctaggaaagtgagcacatacagaacagagaacttgcttcattaacaaaaccactctcacagtaactatcaaactctcaatcaagccaacttgctctcatgataaagctactgatgtgttcagaatggtggagcccttaagacctaatccactcttaaagttctcacctccccataccatcacagtgccaataagattcaataagaacttcggggacattcaaaacctagcaccctctgaaacacaaggaacaaagacatgggagacccagcaacccttcaaggaactctttaatgtaaactactggccccaaatgaaagtaaatacccaaagttttagtagtcattctgtcataataaagatagataggaataattttactcacattttatctaaagcttaataaaatattccacaagtcagtcctttccagagcttacacagggaactttattattaaataggacagttttctttttccttgtgggtggtgctgtggaccaagcccagcacttcctgtgcactgggcaagcaatccagctaccactgcgccagcccttaaacatgattgctgcagcccaatggttctcagccttcctgatgctgccatcctttaacacagttcctcttattgcggtgaccccccaaccataaaattatttcattgttacctcataactgcaattttgctactgttatgaatcataatgtaaatatctgatatgtgatccctccgtaggggtcacaacccacaagttgagaaccactgtcattatcaggagtttctagtatgtcctctgcccctgtcaccaaagctaagtagatgaggggcccaaacttctcaaggtcgtttcatgtccttgactttgctcctgctctcactccagactccctcatctagggcaaaaagagataatggagaaaacccaagaactgggagatctctaactgcaatctcctttggtttgaaattgattagagagagcgagagcacatgctgtttttaggatatttctggggcttacttaagcgctgatgcagattgtggtagcttttttaaagagataaaatgtgaccgtttgacttaagggggtgggagaacgtttgcagtaatattccagagaaacagcaattcgagttttctctgggtcagcagggtgggtgccattttgtcttcaccagggcaagcacacagggtgatatccatctgttgtcaagacccgatttctgaacggaattagtctgcagaccagctcggccctaactaggctcctctgagcacagacatgagggtgattcatcttttcaaaacagagtatgactgggggaaatgttgcattgctgtaatttcacttgggctgggggaggggtgtgcatccctgctattcctgaatgagctcctcattcagccaagagtctggtgtgagcagaagggcagtgaatagtcagtgtgctttagaaacagctgcctcgatcactgattacagtcagcaaatcttgctatgtccgggcctgcctggggctgcaacctgagatgcaaagacatttcccaggcaggtgggacttcaacaatcagcaggaagccagaaaacgttagaaattcaagtccccaggtggcccaaactcatcacatagcataaattggtctctttcctgtgtcagaagagtcagacacctgggaaaacccaattattcttcattgtcatcagcatcatcgatgtcacagcatcatgcaagggcattaatcaaacttgcactgcattcagagcagtacctagtgttgaacaacactaggaagaaatctctccccctctaagtttctcactggcaagtgcgtgcatgcttgtgtgtgtgtgtgtgtgtgtgtgtgtgtgtgtgtgtgtgtgtgtgtgttatgagtgtgtgtggagaccagaggccaatcccaggtatcattccttgaacctcatctagcttgttttctgagacatgatctctcattgatctacagatccctacatgggccaagcaggctggccagagagctccagggatctgcctgcctctgcctcttcagcgctgagattacaagcaacatttttacacccaacatttttaagtggcttgagtcctggggcttgaatgtaggtctttatgtttgcacagtgtaaagtgcttatcaactgaactctttgcagagctcgccctggctctgccctgaggctaactggtcaccctgcgggaattaatggtcactgatctgcacagtgacaccaaaccaaggaggattccgaagacgctgtgagtggagatagacccgcacaccatctgacgtgatgtatcaaagtgatttataaaagaccttgagacactcacaatcacatgttcacaaaaatcacatagaccatgactatataagctttttttcccatttgtgggacaatgatgaagtggttaatccaaagatgaagccattccagacaccattgacagactgccttagaagcattctgtggtaagctcacagggagtgacactatcaggaggtattgtcttgttggagcaggtgtggccttgttggaggaagtgtgccactgtgggggtgggctttgaggcctcctgtgctcaggctatgtgtacagcagaccctgtgtaccgcagcaggctttgtgctcagggaccaggaaatgtttggctttcccaggcacaccaagccaagtcacagggattacattcagcttgtcctggtggcaagagacagttagtgggaaatgaaagaagcagccaggcagagtggcacacacctcagcattcaggaggagggtgaatttgaggccaggtcaggttacacagttatgtcctgtcccaaaaaacaaaccaataataatgaaaaatgaaatatgcaactccattgaagcatactatgagcaaaacatatggagaagtgcacggctgtgactttctgtgtatggggtgagtatattgtgcctacatgtgtgtctacgtccatccagagcccaccctgtttcctgacatacaaaggcatggcatcagagcgttaaataatcatctttaaaacagcatttcatctgtactgtattcttatttatcaatatttatgtatcatttaccatgtgccatattttatttaaattacagttcatgcctggttttgttaataaggttttatggagacacacagtcatgcctatttatttatgtattgctatggctgcttgcatactaagatggttatgatgaggagcacatagctcacaatgcagaagatgctcgcccccagactctttacaggaggtcggcaacttctgtctcaagcacttagttactacttcatttcacgttttccacaaccctaacagtatatatactattattaggagaaatatattcatacatagcaaataaaaacattgtaataggtgctttacaacctcataaggagacgaggaaaatgtttttgttttttttaaaaaaaaaaaaaaaaaaaaaagcatccttgggctcctgtatccaagccattgtgtggaccatgagctcaagaaagaaagagaggaatagaaaacaaaacagtatcagaaaacaaaactagaatagaaggtactcaagagagtcttaaagaaatattgcaaagaaagcaaaatgataaaaatgagatagttaggaaatacaaggactggtgaggaaaccaaccattggcgagaaagaggataaaggaggtcaacactcacttattccctgtgaaggaaacattcggaaggcagcaatctacttgcagtgagatggtctcaagtagttctgctgtgtctccttagtggttaatgttatcaagaacgtttagtacacatactgggcacgtgtttctttttaaaaataatctattcctgtggtagactttggggagccctttttgagggccttaccctgcctggggagtggaggggggatggctaggggcaggtgggatgttggggaggaggggagggagagggagaagggattgacatgtgaagcaagcttgttcctaatttgaactaataaaataaaaaaaagagtctattcctgttgttaactggattcctaggggttttgttgctgttattttctgagccattgatatattctagctaattatttgtaacagcaaagatacagcacaagcctccatgtctataagcaaatcggtggacacacacactgtggtatgtatttatgcataatgaagtattactcacccaaaatgaatgaagtccccatttacagcaaaatgggtgtcactagaggacatcaggttaaatgaattaagacagacacagaaagatgagtgctacatggtttctctcatacgtggaagctaaaaattcacctttaaagtagagttgtgattactaaaggttggggagtgtgtgaaagggtgagtggaaagagattggaattgatgactggacactgtgtggctgtgttgagatactacaacaaaccctatgaaaattgactgttaatgtatagtgatccgaaataaaaaggaagcaaaccagcatttatgaagataatccggttaatatttccacaaatagaaagaagagagcgagggagggagggagggaggaagagagggagggagggagggagggagggagggagggagggagggagggagagagataagagcatagtccatagtcctgatatcaaaatagacttcagaccaaaaggcaaagaacatagtttaattttaaaagttattttttacacgaagatttagccacctaggcaggaaatgacccagtgaccacacataaaatacaagttatggatgatgcatgaattaagtaaaaaaaaaaaaaaatcaatgagaggcccttaacacacctgtctccgaacagtacagatccagtagatcaaagaggcaaggtataaaatatttacctcaaagtagccctttcagacacagattaaataccacactccagtaacaaatgcaccttcttctggggcaggcatagaacacgagctgactgcttacttcagttcaaattgaatgttccatgcaatggaaaaataacccacagtcctgtgtaattaatgatgggggatgtccttatgctgtgaatatgtttctcttattggtgggtgaatagagatgttttggtcaatggatatgcaagatgtagccaggcaggaagtataggtgaggctaccagactgggagaattcaggggagaggaaggcaggcagtaagtcgcaaggaaaacaccatgtagctaccaggaaagtaggctgtccaggtattctccaggaagccaagaccatgtgaagatacatagattaatagaaattggttaacaagtaagagacagctagccaataagaagcctgagctaccagccaaacagtttatttgggtctaaatggcagcaggatggggtgggacagaaacttccgtcaacaaattaaattgtaaagagagaaaagaaattaaaattgaagatgtaaaaaacccatatggaaattagaaagcctcctagatattgggcaagtaagaaatgcaaacagaaataattacgataaaaactctacctactgcttcatgggttataatgaaggagtggctggaggaaatctgtagtgctgaacgtgtctcagttttgggggattttttgtttgtttgtttgtttgtttgtttttaaggatgaaaataaattacagttataaaatgcacagataaaaggaaactaaatttaaaaacaaaaatgttacttataaacaactttatgtctaaaacaatgagaatttggatgaaacaaataaattcttcaataacctaacttataaaatgtacacacaaattttggaaaacaaaatggacaagaaatgtggtcatataccaaaatgtttagtgaccccaaaaatctcaagtcctggaaggcttcgaaatttcttcaaaacattttgaaagagataatatggtggtttgaataaaactcatggggagtggcactattaggaggtgtggccttgttggagtgattctcaagtcaagcccagtgtgtctgattctcttcctgctgccttcagacccaggtgtagaactctcagctccttctccagcaccatgtctgcctacatgccaccatgcttcccaccgtgatgattgttctggtggaagctccaccccagcccctggcatccatatacccaaagagtctgggatgttctgatggaagccccacctctctctctttccctagaccctgtcccctcagaaagcccaccaagagttagcccctccccagggctagaggctacttgagatctggctgccatattttccatgtgattcctctcctgccctcctgagggtcacgcaggaatgcctagctctgttcattaaacctggatttattaattcggtttgattggcttattacatcagcggcgtcggcaattatccaataaccaggaattttaaagttatcaatgataatggactaaatctctgaaactgtaaggcagccccagttaaatgctttcctttgtaagagcttccatgatcatagtgtctctttatagcaatagaaaccctaagacagttatcaaaatgagaaagaaacttttatgccaatctctaaagacattataggaacacacattggtctatgtgttgaccccacagttggccaaaactaagtcctcctctagagtctctccacaagtaactgagaacctatttccatctaaggcagcataaacaggacctggctgatgccctgtagacaatgtgcaaagagctatggcatccaagaccaactgatgagcctagaagagcacgctgaggttgaaacagctagcgggggatgaaaaaaaaggcaatgggatccagaggtggaatcccaatgtagttctatacagcactgttcagaggtagaatcccaatgcagttatatacagcactgtttacagcagctacattatgggaacaacctagctgcccatcaacagagggagccacaagaaaacatggcatatacacacactcacacacaggggcatgcttttcagtcataaaaacagagtggagtagagttgtgtcgtttgcaggaaaatgcatgcaactatggataatcgtagtaaggtaattaagtcagtctagagaagcaaatgtcacacactttctctctttttggtaccctagatcttatatagatacataaaatcatatacaaatgacatgaaagtaggagaattctggaagaaagagaggactctcagacaggggggaaaagaggaggtagctagagaatgagaaggatggagctcaaagtacatattatacttgcatgaaaatggccttagagaaccatgtgataaagacaacagaataagataaaaacagaaagatggagaaggggcacccagaaaaacagcacccaggtgccatgaatgtttaagaaaaaggagattcttctaggtgggggtgcatttgaaccccttgtctgaaacaagagagacactgatttctcccgggttcatggttatccctcaccccagacttcttagaaaccacagacagtttttagcctcctctgttcctcaagcaactctgtagcagagccactctcctagaacaaactgcaagcagagaatcccactgcctatccaggaaaggcatccaggtgaaatgtggaattgctgacctttggagcctgtgtctcagaataaagcacgcatctctgaccatgctcgctgatgtatgctggctgtcttccagctgtcctcaccagcatatccccaagctgtgcgtcctctaccccagcctcacagcccagcacttaacagcattggttgttttcggtagtgtaccgtcagtgtcgatggagtctagctgagggcaacagaagtatgaaagaggaaggagggtagaagacagggtcagtcccctgcccatcctccctgcaacattaggcatctctccacaactaattctgtccctgggttccagtaattatttctcccacacatacccttccctgtcctgtgcccaatcccccaacaagcccctatgtccactattgttttcctagggtactaagtcaccctcatggttttctctgtttgcataatagtttgagaacaattatacataaactcccttcaaaagtccagcatcctgtcccatgctgtttccaagcctctgatgctacgaatgaagaaaacgaacagaggagcctggatggaaagcagggctttgcagctctgtcagcactctggaccacagcagtgagacctgtccccagggataactgtcattctaggatatccccaatgtggaaataggaagaaaactggtgtccatctttgctggccgtagaaaactgaaattaatgtccatcttatttcagtgcagtgtctgcaagatcaatcttgcacttgacaagcattaattgtgaaggaccctaacaagcattttgagattattatgaaattgtgtgctttcttagccttgattttatctttgcaagtcaataaagtagtatcacttgctatgttactaaaatattaacttctatgtatgtggggccaggaagcaaaaaaaagtgctgtccaattccctgcagtctggcttgtccttcattcagggactaagagggcttttgtgacaacgtcttgacgtggaatccccttctgcaggtgtgtgtgtgcgtgcgtgcgtgcgtgcgtgcgtgcgtgccgtgcgtgcgtgcgtgcgtgcgtgtgtgtgtgtgtgtgtgtgtgtgtgtgtgtgtgtttacataggtatcacacatcacaaccaaagaacctaggttctaaatgtggaccaagaaacttaagaattacatagtttaaatgcccagataaacagaatataagacactattgtcacccaaacaatattacccaacaatgtaaataatgtacttcacataaaaacatttttaaaaaactcaaatgtggggcagtctgtcttttgaaacaaacaagagcctgaaatagggggaaatagcgtaacataacccaacataacccactgtgttcaaaaaacaaatgttaattaaaagcttggcagtgcctcacaaaatgcataccacagagtgtgcccctggagtttgcaacatgattagggaggcaagccaaatatatctttagtaattattaaagagcattagcaagcatattttggacagttgaagtgtgtcattaaaaaattaagtccagggatgggaagatggcacagtgggtaggaaaacttgctatgcaaacatgaggacctgagttcaaatccccagtacctatgtaatacaacggtgatggtcgtagattcctatagccccagcactatcagaggcagagacaggaagatcagcttgctggctaccagcctcgctcaaggttcagtgagagacaccgtctcaagaaaaccaagtagaaagaaatagagcaggacaccaaacctcctcctctggcctgggcatgcatgcacagacacatgcatccacatacatggtcacacacacacacacacacacacacacacacacacacacacacacaaataaataataaaaataagagcaagtgtctcttgaaccggatcagagaagagagggctgtagagggctgccttacttctgccctcagtctgtctgttcttgatccacagctatgcaaaccaacaggctcacgctccttccacaatgccttccccacagtgatggactgaaacctcaaacacaaaacccaaaaaacatccccttaacttgcctcttatccagtgtttggtctcggtaatgaggaaagtggtgcacgtggcaacaagaggccatatccatcacgactctgttttatccagtatctccataagaatcaggagaatcccgcccttctccttccgctggcctactggtcctttgtgcagaaggtaactcctttgctgttctgtttactagggacagggagcaaagcccattgtgaaggtccctagagcaaaagaaaggaaacaccatggaaggaagccccagccccagagccccaccatgaacttcacagttccaaggcacacatgggtgcagacgctcattctgtacaggccgccagagcaaagcgcctgttacggtttggctgtgaaacgccccctacaggctccagctggcggtgctgtcaggtcccagcacacagacccctgcccgttgtctctctcgtcccccagttctcacctgtaagttctttgtgccctgaagcccccaacacagaaaactgaggaaagcctcccctgtctacttgttcaaggtcagctttgaataaacctgtttccatccaccaatttctgtctcctgaatcctcaccacaggtcacttgccttgttaacctgggggcatttaatatcagctctaacaactcccttccaaatacacttgaaaagctgacacacgtcacagatatacctcacctataagaataaaaaaaaatgtgacaataaatagaaaacacctaaaggatgaaattatcatcaggagccctcatgaatctcattacttttctatccagacccaagggctggggattcactcctatctgtcttattgagagccagggggagggcagagctgtgtgactgagtcacgtggtccaacagcttgctcccacagagcctgtatgcatatttggcagctgatagggaagtcggatgtggtaagcaggtctgatccattagtgacgtgtggattggtgggtgacgcatgggtacagaggatgggggtgagaaaaaatgcctttgggaaccagtcaagtttaccgctcatgccttgttttccaactggttcaaatagacacacttttgatgcagcaggacacaaggctcctaactaagtgaagaaattggggaatggcaaacagtgacaagatgtctcctgtcttcttttaaatcgattcttcctccatggcagcagagagaagccctgagggagccccgaggaaaaattttaaagccatccatggaccgatacaatatgagctttccagtggcacccccaacaagatcagcatccactgccaggtgacagaaactggtcagatgactctgctactgccaaattctcaggagggcaatgtcacaggcagaaaaggagctatgagtggccctcagatcaagtacaggagctgtaaaatcaaagccatgagatgaaaagaattttccttgtatctcacagactgaaagaacaaagaggaaagaattaacatttcccaggattgccagatccagtgagtgaaggagaattctatttgggcttgggagaatgcaggaatagaaccatagataggatagaaatgttgacaagcgtctgttcattcataaatcagtcagtggttgtcaaacagctgactacttgccaaggttcaaatgcatggataagagctatagaaaaaaataaaatacatttatgtctaatcctgagatgggcacgaggtgcgggggactcaggagatggcaggagggagtggacagctgagctggctcttctgctgagtcttcagtgtctctgctgggagactaacagccaggagaacctggcagagcaaacaactggaggtgagctgaggagtatttgtgcagacagcctctctgcacatgtgtgggaaaggcggggaaaggagtgaggacaagccacagtgtcaagggagcccagaccagagcaggccttctcagaacggggtggcattgtactccgttagttggggattctaaagtgagaacttgtctccaaatccactcaaggtcacatgggacagaacaaggagaaactgttactttttcttccctccaaaatcctttccctaacccatcagtggcccatccttctcatgtgatagtctgggttctaaagaagcctctgtagtgccatcccccccattccaaacaagtcaacttgcaaaaaagagtaaatgtatttgtctgccaagaaaatgaaaatatgctccccaaggttccaaggttccaaggtcagaccaaagaggcaaagaagaacacagctcagcacaaagacctcatccaccgtcatgccataacttctccatgtcccttcaaagctccttgcacccctgacccttctggcctcctatatatatctgagacagaaaaatctctatttctgtcaaggccagacttgaatgcatccattccttcctcaaatcctcaaactccaggttttcaggacactgggtttctggtcagtagacctagctctgccttggtaacctgcatctctagcagttctcgggtgatgcagatattggtggcagtgatgtcactgtaggacacaggtccttttacatgttctgggtctcaccatagacaactaccaattcagagaggaactggatgaacaactcactagagtcgggggataccctgaacaacacaccaggtcagcactgtctctataccagaaaagaggggtgcagaaccccctctcccagggcacagggcgattgtgaaccagcataaaagccctgctaaaactgactaaactcactactagtgttaatggcatgtttgtttccctataaatagctaaatagtggtgaaaagcagttgttgggtttttctttgctggtcttggctgccttaaacaacaaaaactatcagtcttagccagccagactaccttttagccagctcaggaaatcctgcacattctatagataactctgaaaactacgtgatgaccttagcttattgctctaattcttgaaagtccagtgtcagccagagctattcaaaacagcttgtaccagactttggatatcacaaacactaatgaactccaaaggaccctgagcaaagaaggaaaagcctcctccaactgtctagcagatggcctgctatgactggtgctaagaagcaaggctgtgatgggtctaaaacacaaacctcaatgactgttcctgatgccaagcagcaaggccatgatcaacccaaacaaatgaccatgttaggttaaaaaaaattttaaagtggccatgactggtccaaataaatggctaaattgatccaaatatgttgctggaattttttgttccactgccgagttgccccaaataaacacacagacgatatattaattataaaactgttggccagtggctagggcttcttactggctagctctgttctaattgttaacccatttctattaatgtaagtatttccacatggtcttggcttaccggagaatacttggacctgttactcctttgtggtctccatggtgtctccttggggtctctctctgcctgccttttccagaattctccttgtctcctagccccacctatcttcctgactctattggccaaacagtgttttattcatcaaccaataagagaagcatatacagaaggacatcccccatcacaaacgccctttcctgggctgtataagcagattgctgaaatcgctggtgactctgctaggaaccactaccgctgcctacctttgtgttgaagctccagacctagtaagaggcttctcttgggtggctttctcttgctgactttcagtagcctgggctgagctggtaacctgagggaagagacagcagactgtggtagcaacttcagaacagcggcggcagtcagggctggggagtgggtaggccacactgcgaaagcaccacagcagctaactgcatctcagctgaagacagcctggccaggtgccccaagcagtcctggtggacttggaggccccaagtcattcctgtctagctgagctgtggaaggattgagcagacgagtcccatcacagcaggaagaaaacatcaaataaacaagtagtcacagcgtggcctagctgcaaaagcagcaaggcaacttaggtgaccaacagctaaatgaggccagtgaacagttgagtatatacagggcaggatgaaggctggcagaagtagagagatgccgagagagggatagaaggctaaaagaggcagaaaagagaaattgcaagtcgtggtctccagaatcccagagtgatgtgaatctcagacctggggcttggagctctgtcatcagctactgctgaggtctaagggtcccaactgcttaaggtccacgggcgctgaaatgcgaggaccacatggggactgaacactagagggtgccacttgctgccgcttggggctgcctatggctgctgctcagtgagcacctccaaagactgctgttgacaagcagcttcttgtctatccaaggtttctacccagggcgaacaaaggactctcaggcagaaggtcgaaagaagatggagaggaaaagtgctacgctctgagttagaagtcaaaaagcaagtgggatccgccaccgcccatgaagcccttgtcctgaagaggtggcgttgggagacctcagtgagtatctcattgaaggaacacttcctcatcttgtccttaggcatgctctgttgacaagaccataatagtaactcggatcacttcaggaagcagtaaaaaagtctgccatgaaagaatgagaactagaaaaacagctgtaggtaggaaaaagtcatagattcaagggtgagtgtgccacacacccttctagcagtgagggctcagagtctctctgggaatcaaagatcagtacgaacaacacggaaatgcatattggaagaagggcatcagatcaaacagacactgtgcaaggaccccagaagccagagcatccctgagtacaccttcacctggtcactaaccataactgaccctgacattaccatcggcgagtcactggccatatacggcaaagaaccagtttgtttgtttgttgttttgaatatctaatcagcctaacaccagtgctttctgtattagttacttttctcattgcaatagtacatttggcaggaacagcttaagaggggaaggatttattcagatgcacagtttgtccaggaatgaatggcccatcatggcagggaaggcacagtatggttcatggcagctgggctctgccagtggtggctggagcatatggcatcctctccatggatcagaaggctgggctgtcatcctcaagacccaactccaagccaccaagggtccagacacattaacctgtgggggtttacatccaaatcatagcacttttgtaaatgtgattttcttaatgaattcctagagagccagtctattaaaactcaagtggagggagaatctaccaaatacacaacaagtacaccatgggagtgtccaagtcataaaataattcaaaataaaaaagtttcagcaactgtcacaactaagaggagactaaggagacaataaaatctgtcgtgttttcctagatgggtggaactggaacagcaaaggacactggggaaaatgaaggcagcgtgaaaggactatggactttggctaaaagtgatggactgagcagggcgttggtggctcacgcctttaatcccagcactcgggaggcagaggcaggcggatctctcgagaccagcctggtctacaagagctaattccaggacagcctccaaagccacagagaaaccctgtctcgaaaaaccaaaaaaaaaaaaaaaaaaaaaaaaaaaaaaaaaaaaaaaaaagcgatggactgataccggtgcagtggtgccaacagctgtacaagatccctgtaagccctgtaagtcattaacaagagcaacaccctataaggtgtctgggaactataccaaccctgacatttttccttaaatctaaaactcttctaaaatgataaaattcacatttaaaagtaaagcgctgaaaggataaattacaagaaaaataagaactaagatgaacaaaataaaaactccaaatatatgatgctcggtagatacataattatatttcaacagatacagaacaaagaaaggcatggcaaccattatacacctttttcttaaaagtgcacatgtaggtgaataagtgacggattgctgatatgctgcactcatggcatttgtcattgcaactaagggctgtgtctaagagatcaagtccccacattgcacaaatcacatacagaagaaacattcttggccaggcggtggtggtgccacctttaaccccaacactctacaggcaaaggcaggtgcatctctgtgagtttggggccagcctggtctacatggtgagttccaggacagccagggctacatagagaaagcaaaacaaaaagaaaggaagaagaagaagaaacacgtttgccactaagttctattaatgcgtctgtggtctctacttgtcaacctctgatcaggcttgctttccctgcttcacacaggtgatgcccaagtggtttgtttcattttgatgacaccaacagcagagaaatcattttatagaagtattttagcagcagggtcacatgactttcaaggacgtactagtgagctttatctgtttatccaacagggagaagacaatagagcggtttgttttccatatttattttcaaaattgtattttcaatcagtcatcatctcacccaaaatcttttcttctgtgaagttagagatcaagtgatttctcagttaaagaaatggatacaagatgaaggatatttacttcatttaatgagcaataagacaaaagagttctccatcaaagtccatgaggttgagacaggaaaggcaatgcacactgttaccccagaattcagaggccaactcaggacccagcatgagaaggcgtctgaaaaagccaacaacaaaaacaaaagagaatccatacagtgttggctgataaccttttgcattttttgaatattgagattgtgatttatttgataatcgttatggaaccacaggccatgtcataacaatctgtggagactgatcttctcagcctctaactcttgtcttgtcctttgatcttgtctgccactgaaaggctgaccctcttctcacagaaatatcagggttgctataacatcaaacacaactgactgatggtacctccagccgtgctcttcacctttgcaccaagataagctgacagcgttcttatctcacagaactaaatcaagcctcctccacctgtcttcatcatcattgtgaatccttccacatctaacacacaataagaaaaagaacaaaatgtagtttattatcctttacttccattgggatttttgaaaaatttgaagttttgcctagtagttctattcatgacaaaactttctcaggagaaaatgatttgttggttttccttctggttcaaggtcctcgattctagtagccagaaccttttcttttcgttgcaattgtgacatgagaatacgcttctacagaaaactcaaactctaaaatattcctaacagtaacccttcggaggtgggggaggaatgagggacaccccagtcttattaatccgcaatgttcagaagttgggctaccagctgtactcagggcaagaccctcatgcattctgtaaacattcccacttccttgtaattacactttaatatgttatgccataaaagataacagtgacatccaaaggcaatagacggtctggtggcctcactcagaccttgccaaagtctctattatcttagcttcagatcagcctctaagccttgtggactgagttaagccatctgtaaatgtcacgtccttatggatccatgagtatgagggtcattgtcacaagtcagacaagcattcatttcaaagctttgcaaaatttgccttcaaaagtcacctcagcaaaataaaataaaataaaatactaccttaccgaataaatgtgaccactttacattctttaaatgcatctttgtattataaactatccccctttaaacatctgtatctgattcaggaacccccctttccctgtctcttcttcactgtcttcatcctccctaagatattctcttatgttcttgaattccaaacttcagtctgctacacattaaaaaagactaaaatctaccgggccgtcacacagaggtcttgtcaaactctccagaacattcatggtcagtcaccctcatagaacatccgggaccagcgactctgaagagtgtggactgaggaaccagagcccatttccctacatgagaagtggaacacagacctcagtgctgtttcagaaaaagaaaaacgcagccgaaagaatctgtctcctctcactgatgctgtagcagaacggtttctactcaagccttgagcatataattctcccagcacacacaactcagtctcacactgttcactcttctctgtctcccatcatctgggcagcctccgcctgacactcacagcctctttgtcacacaccagcagaaaaggcaacggtgaccatgtttctcagacccttcctagacaaccgcagctgtcatcagacagggtatttggctcctgtgtcttcactgttctattttgagaggggaaactaagtcgtatgtctcaaagaagtgcttttccattgtctttttaaaatcttacaattagagaaattttggtgtcccacagaaatcccgttgttgccataaaagccttctttgcttggcctggcatagataataaagtatctcacatccaatagcatatttaattctgacgacacccccagagagaggtcatgcagatattattgtgtccatttaatacacaagggccataaatgtcctacttactcagagaagtggaaaacccaatgaccacatctgattaaaggcaaacctgcatccagggctccaagctgtcttgcttagatgtccagcatccctctcagacaggtcaaatgtcttgttcaagtttgtacatctcataattcctaagaaggagggttgcctggtattccatattctaaatctaacgccttctcacatagcttcttctggtggatagcagtcaaagtcaggtgagatggcacatgcccatcatcccagtactgagagacaggagaatcaggagttcagagtcatcctcagttacatagctgctcaacgttggtgtgggttacatgaaactgtctcaaaaaagtgacagaggagctggagaggtagctcaacagttaagagcactgcatgctctttcagaggacctgggttcaattcccagcacccacatggtagctataactccatttcctgtaactcctgtaactccatgcctgtaactccatttccaggggacccaatgccctgttttgatctccatgtacacagcattcatatggtacatagacatgcatgaaagcaaatacccatacaaataaaataaatcaataatcaaattcaataagagagacatagacattcacacagaaagatgggggtggagagagagagagaaagagagagagagagagagagagagagagagagagagagagagagagattcccctacttcaggagaatatctcatgtattcatatatggttcctgtcatattgcactgtaagttttgttgtaatactgccttatgtgatcgtgaaggcagacactgtcaggacactaacacaaataataataataatctggaccctttttcatttttctgtgttctttttcattttattagaccttgtcctaggaccagatgtagacactatgtccctttgagggaagactagagacatttttctgtgggccacagattcctacagctaacatctaactgggaccacccaattatagcctagactgatggtcaaaaatatctattttcaggcaggaaggttgtctcagtggataagcctttggactgattttgcaaaggactgaagttcagttccaagcactcatttgggggctcagaactgctggtaactccagttctggggataaaatgcttctgaccaagccaagcagttggggtgcacacctttaatcccagcactcggaaggcagaggcaggaggatctcttcgagttcaagaccaacctgggctacaagagctagttccaggacacctccaaagctacagagaaaccctgtctcaaaaaaatacttctgacctgcacgcgcattcgcgcgcgcgcacacacacacacactcactttaaaagtaacaaaataaatatttaacgatatatccagttgatgggggaaatacttctgtgtatgtttataaataaagtacttgcttggccaatgagacagcaggttaggctggactaggagtcaaagaggattctgggaaatgtagtagagaagtggtgttccagacaggaagtgacatagcaaggagactcatatttaagaagaggaaaaagggagtgttactctcttttcccctcggctcctgctccagcggcacgatatgattcaccagcaaggagggacgccaataaggcgtccgataagataagtcccataaaatatatagatgtatggtaattgagactgagctaacaagtgaaaatcctaggcattggccaagcagcattgtaactaatacaagtctctctgtatattcatttgggcctaactcgggcaggcggctggcgtaaagctcacacgtggcaatggggctcaggcggcttttggcaaaaagatttatcgtaacatccagtctctgttgtttaataacagaactgccaaattttcacttaccctgggagaaactcaggccaatagtgtgtgagcaaagggatgtgaggccatgcctgcaaagagaaatgcacgtgttcctctatgtccatgtcccctttcctctgctctcactgaggaattgaaaaaaaatggatcacctgccatggacagagaagtagaagcttttgccaccccccatcaacctctacacacacccaggagcctatttcccggtggcctgtcatctaggaggtaaggttctacactatatgagtcatcatacattgaagtatctttgttattgccctgatagcccaaatcacacaacaaagactggaatgacttctcgacattgaatgttagaggagcaaagtatgcaaagggctgtgagaagggaatagaagaaaaaaatggtctaagagctagattaaaatttgccacagaattctggagactctaacactaaaggagctgtttataccaacatagaataaccacgataaaattgacagcatgctctcattcgttaatttttaaaagacttgtgagtgaagatttctgtgtatgggtgattataagaaaacacctatgaagctgttgagtggactcttctggagatgggaactggaattcaagagcagcagcatcagaggaagacatcttcctccaggtgcctatagacgtgagtccatgtaccactcttcacagaacacagttaacccttagaaagtcagtggggtggaggggatatgctcagggtgcattgtatccacgcatgagcctgtcatggtgtcactcatggtcttgtccagttaggagaaggcaactgaaagtgaggaaaatgccaacccatccacaatgagttgttagtgatgatgaggatctcagctatttgatatttgtcacaaggggatcttcaaactttggccaggggtggggtgggggatggagctggtctgtggggggtaatcatatcttcagtgatgcagagaaagaaaatacaatatgctctaatgtagctctgaccaatgactatgaaagaaaatacaatatgctctaatgtagctctgaccaatgaatatgaaagcaaagttcattttgagagttagatagatgatagataaatagataatagacagacagatagataagcatgtgacaggtagacagacatagagaaaacacaagaaaattgggactttttccgatgtatctctgtttgttggaaacccctgtggtcctttctctgctcctcccacacatatcatcagcactttgaaaaggtcatgcttcaaggaagggttcatcaccaagtcagagtggagacagctcagccgcagccccccttgcactgatccacggtgtctgccaagcccctcatcagcacctcagtcaatatttcatctccaagctaaaattaagttgtcacccctcccacaagcaacgctactcctgaaataaaaattttacatgtggttgcaggaggaccacttagcatctgaaaacacttcccctgtgaccttgagcttttatcgcctgagagccaaaataaaatctctgactcaagatttatgaataaataattagccatgaaaataaaagcagctctgaaaaaaaaaagaaaggaaacaggacttttccattggtggatgaagtttcttcggtggatgttactctctctttcctgcacaaaatgtttgtaaaacaaaaaacaaacaaaacaaacaaaaaaccacgaagctcaggagccatcgacagattccagcctccctcttccatggaccttccagaatcttcagaatgggttcaggttacccagacaatgggcagcaatactacacacactgcctccatcatcctcaggtccacccatcccactgtatgacacccgagggcagagtgtgggtgtgatttggcaatggttcaactaccaaccacactcttcccgcagcagggatcagagtcgggaggtagaagagtccggatccaatggacagcactctgggacaaacttaatgtccccattgccagacggctgatgccaccccaccttctgagagaagctcacacactgaaacaaaaatactggcctcagaggttggaggaaagtgtcagcaatttaagggcacttgtccttgcagaagacctgggtctgtgcccagccagcatccactttgtggctcacgaccatctataactccagttccagggaatccaacgcctccttctgacttctctgggagcacgtgtgctgcacagacatatatacaggcaattcacacacatgaaacagataaatctttaaaagtgtttaaataaaaatgaccttagagaacatctcaacccacccccatctaggaactacaagggcaaaaaattgcaaagagcccagtcctcaatagtgttttcaggaagccagtccacagagtgggtcctcagctctgcctgtcctacgccctttgaagaactgtgcacaccttctccacttcaacaaatcctccccattgtgtacagaggaatcgaagaaggagctgcctgctgccagcagtgagaggggaatgtgacaaggagccaggcacctcctgctctcctccctacaactgcaatttaggagcaaacataaaaagcccttgaactcctcgagctgaaaaatctaacttttcaggttttattttcacagctcctattacttttccttaatcagatctgtgtactgccctgctaactcatttttgccatgtattttctgaagaccaacaacagattaagtaatacaaaagcccaatgggcccttcccagtctatgacggactccttcttgacgtggagtgaggggggcacaggctgtaagagatctcaattccgaagattaaagatggcaaaaactttgacccaacaaagctgaattttctcagcactgtgacaaatgtctgacggtaatgacttcagggtttttagtccataaggatggtggcagtggttctccaaccatggcaacaggagtacaaggtggggctcctcacatctttcaggtgtgtgactctaaaagtattccccacctcccccagccaggacccgccccctaaaggctcaactttcaaccagctagggaccccaggtgttggaatatatgagcataattcaaaattgagccataacagaaatcaaacagaggttcctcctcggtatcacccactcaggactcagaaataagaggaatttctccaacagttctgtaacttctcagggtcccctcaccttcaggatttcaggacacagcgctggagagatggcctggcagctaagggcacttgatgcccttccagggagcccaagtttggttcccagcacccacaatagttggtcatcttaaatccagctccaggggatacagtgacatctgctggtctcattggggcacacacacacacacacacacacacacacacacacacacacacacacacacactttttttttattttatttttttgtgacagagtccaggactcccaatattccttcattactcagggagcctttggtgaatttaggtctccgtggcagcccctaacagtaaatctccaccctaagtcattttatgacacaaaaaaacaacttcgtaaatcctgtgtaataccaacagctgcttaacaactgctcactcgtggccccctatggtccaaacaaatttagcctgctaatcaccattcttatttgtatatcaaaaagttttactcctgccctaaatgctttaagcaacatgattttaacataattaggatataattaactacaagcatttaaagtataaaatttgatgttttaacaagtgtaaaacaacacggcactgtctataatcaagagaataaacacagagccaagatggcaggtcagaagctggcagtgtgtgctgacttcccagccgatcagattaaagaagccagaaaacagtttctcagcaaggtggtagtctgaggagacgcactgaaatttaatactgggcagagacttgaggagatcaagtactctgcgtactgcaacagaagacaaaatatagtacaagtgctgaaaccatagtggctggcttgcttcactgtcagtttagtgcaaattacagatcacctgagaagagagtctcattgaccaattgtctacgatggcatatctgtgatatgagaaggtccaccaaaggcagcaccattccctagacagaggaacatgaactatattacagaaatccagctgagcacaagcaagcaagcgagtatgcatgcattcatttctgctcttggctgtgggaatgatacaaggagctgtctgaagttcctacttgacttgtccacaaatacaggctataacctggaatgtaagccaaagtaaactcctttcttcctcaggtggggagtggggtgttctcatattttgtagtcttaattcatttaagataacctccaacgttactataagggaggtcagacttccatgcattcctattttttaaaatattttatttattatgtatacaacattctgcttccatgtatatctgcacaccagaagagagcaccagatctcataacagatggttgtgagccaccatgtggttgctgggaattgaactcaggacctctggaagaacagtcgcagtgctcttaacctctgagccatctctccagccccgcattcgtattttgatagcattttaaaacagaagagaatcagccccctctcaatcccagtagaaaaagaacggaagatggcacagcatgaatacacatgcgctctggtctgcaccaatatccaggcggtcccagaagggtcttcagttctctagaagttctgttcttgagtgttcttatcctaatgttctccttttcgcagtgtcaaagagtcctcctggggatcctaaccacacggtgtactgggctttctaaaaaccatgttaactgcttgataaaatacagccaatctttaaaatcaaggccaactttgaaatgaagaggttccaagagaaaagaatcaaagagagaggctcaaagaacctgcgcttgtatgtccttctcttgtttgccttctcaacactttgagagaatcattagataaacactccttgacttaaaatgcgtcacactgaatgcatccattgaaggcagaaaatgtcttgagttgggatgcattggattcacctaactactaaacacttacttgaagcacaagcagccaggattggcctacaattaattatacagaaccctctatctaatcggaagcctgccatgcgtgtgtgcatgtgtgtgtgaacacatacgtgtgagcatctccatatatgtgtgtaggtacatgtggaggctaaagttttgtgttttttttttttttcctgagagggcctcttgttagcctagggtttgccaagcaggctaagctaactggccactgtcctcctaaagctacctgtccgcctccctcagaagtgtaccaccatgcttagctgttttatttgtgttctgaagaatcaaacccagttctctatgactccatgattgcattttaccaactaaacactacagcctgtccttaaatatcaatatctcatgaaatatatttaaggctgcagcaatatggtacgtagttgttgcctcttaggatcacgtgtctgagagggagctgtggctcatggctgcctccagcatcacaaggttggggcacacagcgtagagcagcatggactctccatgacgtttgttgagaacacaccttttcacttaatgcagccaactttggagtggttctgttgatacctcactattaagcaacatattttgtcatttatggaatcaccatgtgtttactggtgaaaaagaagacaaacaaaaatagagagacacagtctctacactatggatcccacccatcatatgtaaaagatatttgaaaaaaatgcatatgcactaaacatgaagacattttcttgttatgattccctgaacaatacaactatttacatcatatttacactgggttcagcactgtacatagcttatagacactttcaactatatgaagaatgtgtgtaagagacattgaaacacaaggaaccacagcacccttggattttagaatcaacagagaatcagagtcagtcctccaaagatactgaagaatgactgtcatccaaatcttgctcagccagagaaaaccatcatcattttcctgtgcacgtattgtgtaataaaaataagaccaggctaagtagaaacaaaccaatattaccaacacttgggaagctgagccccaaatgtcatgagttcaactctagcctgagctacataatacgttgccttgaagaaaagaatcgtattatttacagtctgttttttaatcagctgtgcatgtatttaatttgttttcatactatcatttggcagtaaagttatttgtattcatgtgaaaatgtcacatttcaccaaccccctgtttctagagatgtgttttcaacttctttcttgcttctttatcatacttttttgtttaaatttaggtgtttttttatagtgagctttgttttgacttggtttaaggtttttttcttggtttattttttggtgtgtgtgtgagagagagagagagagagagagacagagacagagacagagacagagacagagacagagagacagagagacagagacagagagagggtctctctgggtagcctgggctggcctcaaactcatgcctctgtcttccaagtacaggaagcagatgatgagaatgtctggctctccagttctttctccattatagcaatacaaaaaatgtaactaaattgttcacacttttctacagaaccagtgtctaaaagtatcattgctgagccaaagatatctacattttaagatgttctcatttgaattgctagctacatcttcaaaagaatagtaatttatattatagtcagaagtaaaataaaataaagacctggtaataataagaaaagaacaaccttgaattatagtgaattatctttttaatatttatcaatttgatgggtaaatcatctcttactgttttagtttgcattgctcatgttttcattggccattgttggttttctttctataagttgcctacttatatatttgccatagtttactgaacatagctttcttaagctttaaaaaaaatcatttaaacttgtgtgcctgtgtgtaggcttgtacacagacatgcatgtgcaggagcccacaggagccagaagagggtgtctgatcctctgcaacagttgcaagcagcttgatggatgttagggttagaactgaactcaggtcctctgcaagatgaggacctaagctccctctctagcctctgagcacttacttttaaacctactggcaaagtaatctatgcctttcatatggacttattatcagcccaaaatgtctgaacccttagaaatgagattactcagacccaactctcctatctagtgtgtaccctacttcctggtagatatttatgctctgtttgcatatcgctccatgaaattgtattttgttgaattcagagcatagtaacaaacccttaaaatgattttgaggccgatcctatcgtattttctccctgctctgtgacactaccaatttaacccatatcccattaacacatttacttcggctctgataaatgatgttacaggacaggcaaggatccacggagagcccagagatgtccttacaaaaaggcttcattaaccattcctctcatagctttcttcagactgtgttggaatcctgtgcatttattaatgtgtatggccactacaggaaagaataaatagtaagtcagcaaaacatggcaccagttcagagaagtttacagcctcatgagaaagtcaccaatcaggtatgtgggaaacatttaattgctacaatgatgagtacaatagggggatattcagtactgtaacatacagtaataggggtctaccagttgcatatgtcaatcaaatcatgatagttgtttggtttaaggtagagctgatgcagagaaatagacttgggagataatatatatatatatatatatatatatatgtatatatatatatatatatatatatgcaaaaccaaaagcgcttcttgatacattatacacagaaaacacgagaaaagagttgggtaggaagagtcctaggtttctaccttgtataggtaagacacttggctattacctcaggtgtcccatagggatctacaagtaaataagtgtgtgtaagtgtgtgtatatgtatgtgtacatacatgtgtatttgtgcatatgtgtgtataatttgttctaatattaatgcaaactttttaaaggtttatcgatttttattttatgtatgaatatttttcttacacgtatatatgtgctccatatgtgtgacgtgtccatggaagccagaagaaggcaatgaaatcccatggaactggagctataaacagttattcaccaccaagtggatgctgggaactgaagcctggttctccacaagagcaatcactctgaaatgctgacccatctctccaagacccaatataatagaaacattttaagctgactatatgaccactcactcatgttgttaaataattccccattgactatatggccactcacatggttaaataattccccatactagagtccagattgcatgttctttcaaggtcctatcagcaccaagaaccacctggtgtcacctgggtgtcaggttgagtcttggtggaatggcaccacagctcacagctctgagtttggcaggtcctcgtgtcaactgacccctttaaatataactctaacactgaattctttcaccagcataaagatccaactgaggggtagttcatttgcatttttcattcttttaaatcagcacattggaagccttgtcagtataaaacttcaaagaagtcgattgttttaattatcacaagctaattgggaaactctggagcagatctaaaaataaataaataagtaggtgacctcaggccagggaaaggacaaggaggttgtatcaggctatggaattgaagggatgtttttatggaagttaacagagatgaaagtggagagaaccttaattagcctaatgctgaactcagttaagaactgaacagaaacagtgaaggtgctgctcaaagggcctactgctgtaaattaagtaaaattaggttactttaaaaaaaatcctccataaagacattcaataaatttgagtactaaagattgctacacacacagagagagagagagagagagagagagagagagagagagagagagagagagcagggaaacagtgtgagcctatgttgggtcaattgattttcaagagggtgccaagacagttcaatggggaaggaattttttcaatttaatgttcaataaacattcaatgaatatttattcaatgcaataaaaatgtatcagttgaaagaatgaagttggatcccttatatcacaaacacacactcatacacacacacacacacacacacacacacacacacacacacacactttgaaaatggacatagaactaaatttaagaacccaacaaaacatattcatgaaaatgaatgtttcttgtcaattctttttttgagacaagctctcactatatagcccaggctgccttcaaattgaccatcctcctgtctgtcagaagataggatgcactataaaacctagccacaaggtggattatttaagaataaagaaaaactaaacaataaaacagaacacacagagaggagtctttaaaacaggcccccagaacactatttcttattttagatgatcccagactcttgagtggatgctatagttagaaaaggattgttctggtacacaacccatagatcccataatgtaagaacacatttctgcagagtctatgacatgacaaaattcagttggacctgagtaatcatttttattgaaattaagtctctgataatccacctcctactggattccactcaacatcaaatatcacagcataattctaggattttatgctacaggtaaagctattataatctgaaatgtgatgtttaatgctatgtaaaatgtttgaaaactctacagaggaatttctattttcacccctgttatggtcccaattacatataaaaaaaacttctatcaatagatcaaatcctcccaagctaagataaacatctatgctaattcctgcaatgataatgcttcttatattggatcagatcttcttatctgttgtagtgatctctggagtccccttaagattaaactgaataacactgagttctgagtgtaacaactgtctgttatagaaatggatgactcctctcacagagaaagaaaaatgtaagatgccctttcatgaggctcttgagcatcattttccaatttccctctgtgaagttctgtcaacaaagttgccatgcacaccactcagcgggtggcgtcacccacaaagttcttgcccactcatctgctcatcactaaacatagtgagacattcctttgtctctacatcagacattgactgaggatccaggccttgagggaatatacatgtttttatagaaggaagaattatatcctgatgctctgctctagccaaatatttgcattgctggcattaatttttgtcatcaatcccactacaaacaaatcctcaaaatgaataaaccagtgatgtgtgatctatttttttgcataatgacttaaattttaaaaaaagagaaaacaaccatggctgatgaattaacaaggcattatctctataactaactaagccaaaaatgattattatatcttttatatgaaattatgactcccatctcccggaagaacaagccaggccatgtgggcctatgcacaagccataagcaggccaatattgtgcctgcacctgagtagacagacccatatgtgtttaaggctgtgctgaatccacctgctgaggctcaaagaaataaacaacccagactaaacaaagaaataaactccatgccttcatgagggactaagcaccccaacttggatcgctgcatgccatggtcacaaccctaagacacaatcgaccaaagccattactctcagccacccactcctgcccacaccagcacaagcacttggtctcaataacacaactatgtaatgagtttgtggtcaccatttcctccgcaggagagaaacaggctgataactactccatttttgcttttttgttccctaaatgcagagtttagtagtcacctttatccatagtttgtcatgtcagactcctccaggcagttagtcaagaccaatgatcttggtcttgactagagaagccattgattgtgtgaatagcagcaggaagacagccactagaggacttgcatatgtctgcagaagatagacagccactagaggacttacatatgtctgcaagtatctgacactgttgactacaggaatgtctctagccaggcacagtggcacacacatgtgatttcaacacttgagaggcagaggcaggagaatgaagagttcgaggccttcagggaatacaaggcaatattttgtctcaaagtgaaacaaaaacaaaacaaaaatctctgaatttcatagtttaaaaccatcaagtcagcaaaaacggagattagccatgtttggcaagctcacaaacaacttccatcctgacttttaaaacttactggatatgggagagggtgaagggaagggggaattacataattatattttaatttcataaattgcaaagaaaattagattagaaaaaacaccatgccacttaattctcaaagagttaatttcaagtattacctttaaaaaaatccattgaacctactgggatctttcattaattcataaaactggttctctgtggtcaggatgagtttgccccccaatcatgtgctgaaattgcagtcctcagtgtatcactgctgagagataatggggcccactggaaggctcccctcccatttggggatggcaccctaagaagagatatacaaaggttccatttccaaactctcgctagttcctgcgagagcaaggtattgtaaaaagagcaggcccagctcctgaatttctcacaccctggttcaccagatgacggctcatcccttccaccatgacgtcattaccatgctgtggtcagtatatcagggtaaagaaagccagaggatccctcagcagacactgggcaaaatgatgagtcagacaaacccccttttctatccacacaatccagcctcaggtattttgctattgtaacagaaaatagacaactacagtctcctaccacgccaatctggccctcagacctaaacttctgagtctctatgaatagtctaagattctaatctcattccaggcccccccccataggaaatcctcacagaaagaaacttcgtcttgcaaatataagtctatcttcatcttctctgtgaaccaatgctttatttcacagacgcggtaggagctccactgaagatttttaatacgccctccagaatcacagagtccagttgcccatacctgaataggtattgggtctctcaatatcccccaaatatatagcatgttcaactatattcttcattaggtttctgtttctttatcctaaagagatgtgtttcttttcctatagcaagcaatggttaatgctcgtgtctggaactcttgccccacttagaagctaatgagttaactttgtactgtttcatgggtgcagacaaagggcataagattctagaccacagagaaagttgttattcatggctcggcaaacagaatgagctaatgtttgtgttggttgcctttatctcccccgcctctaattcctatgggagcaacttaaagccacccaggtcagtggtgcacagcacacagtgcagtcaaggcagtaggtgtggggatctgccttctccatagctagcccacacatcgttccaaagaaagtcatcacttcatttctcatggttgctcattggagacatgactttgagcaatgacccaggaaagaatggccaaagccttgcattctggaaactctcagccagaatgcataagcacactcagggtccagggaggattgcctcatccaacaatgactgccaaacactggcagaaggactccgccatctctaaaatacaagctcatgttggatttcagatgctggaaaaatgttgagattccttgtgttttctcaacagaaaatcacaggacatctgatgaaaagggctaaatgaactggtgataacatatagaaaatatgtcataaagaaaatttactatgattttgcattgttttagcaattcttaacagttttaagtcttccttttgtatttcctttaactgacttcttggattcttctctctccagcttgcctccatcatctaggtgctggactgatggtcaggtccctcgttacactgaaaatcaaaagatttccatccttatctcatcctagaagataaagcactttcccttagggacccccaccttaatcagagggtcatctacaaactgctgccatactccagctctcagctctaggttgcggttcagaatttgttaggaagaaaagaggatgatttggaggctgggagatggctcaatggatagagcactctcactaccctaagggtcttggttttatgaccaggcaaggtaattaacatctgcaaacccagtactctgatagtgagatggagagtggagaccagagatcccagctggtacactgcccaccacagcacataacagtgaccctggtgtaaacaagatgagccatgacacctgaggttgccatctgacttacacacacacacacacacacacacacacacacacagagagagagagagagagagagagagagagagagagatgcttaaaagaatatatatttatttatgttctttttttcagctatactgaggattattagcaagtccaactgtcattttttctttcctttcatcaactgtaataacttttttgtcagctatattaaacaattcactgagtgatatctagtggtcactcagactagtctaatcgatacacattgtcttacttagccctcacaaaccttcaacgtagctggataggtgccattattggaatcatcttacagatggagaagcagttcaaaggtgctcatccaacccagcattaagaggtataaaaagaccttaaacccaggcatcttgatcttgaaactgacacttaaaattttttgctatttcttccaaaattattcagattcctcctccacttcctgtctactgtcttaggatcaatagcttctctagtgtcatacttaatataattttcaaaaaaatttgtctttcccaaactcatgctgaaataaaagtagattgagaatacatgacacaaagaaagaaccttgaaatcctcaagaaagaaagaaacagcacattgcaaacagaggaccctcaataagactaacagatttctcaggagatgttttggaggcaaggactggtgagactgctcagtggtgaaaggtgcctgctgaccagcctgaagacctcagttcaatccacagaactcactgtagaaggagagaaatgactccctaaaactgcaatggttataccacattttaaatatagttaattcctctttaaaaaaaatttaaagttagtaacattggaaactctctgctgtatgtattttgccacaaaaaaaaatggagggaattatttctatgagtaacatcctaggtcccactggagtctttgggattctccatgtcacatttccactctgtgactaagagtcactttgagatgaaatgacagagcctctatacagagaagtccttttattctgggctttgacttagagagaccactggctatcactgctgtccttctccccttctttctgtcaacctttggacagagttgtcatttcagatatcctaggccacagcagagccaacagagccatcggagccatcagccttcttctgtttgggactacgtgcaactgtcaccttacctgacatcctctgaatgcatgtgacattaacccaccctacccatcaccggaatcctttctgcattctccaccaccacttctcccctccaatttctacagccttcatccgtgaatgcacagcctaaggaagtaggcatgcattaaacaaataattgcataaataaccacataattccagctctgataaatgctccgaataagtattcgagggtatgttacaaacgttcaactccaggacttactatccctgctataccttttagagattcagaggggtttgcctgacaaaggggcgtggtccttattagttttaattgtgtcttgatagaacactagagtcacctgggaagagagagcctcaattgagggactgccagatcagattggcctgtggctatttctgtgaggaatagccttggctgctgattgatatgtgatagttcatcccactgtggacagtactacccttgggcaagcatgtggtcccaagttgtgttagaaagctggttgagcacaaaccagagggaacaagtcagtaatcagcgtccctcagtggtttcttctgctctggattcccaccttgagttcctgccctgaccacagtcataggccattactaggaagtataagctgaaataagccctttcttcccctataataaagcacctcagataatgcaattataaagagaaaaggatgctttgggctcatggttttctccacatctgtgattaatcagttgtcttggtcaatgtcccattgctgtgaagagacaccatgaccagggcaactcttgtaaaggaaaacatttaattggggttgtcttacaatccagagatttattccattatcatcatggtgggaagcatggcagggtgcaggcagacatggtgctggagagcacctagagagttctacatctggatcagtggaagcagggagaaacaactcaccttggcttgagtttctgtttcctgaaagccgcccctcacccccatgtcatacttcccccaagaaggccacacttcctaatagtgcctctctccctatgagtcttataaggaccattttcttctgaataaaaattcaaaatgaatgaaaaacaacactggtcctgttgcttgaggcctgtgtcaacacaacatcattacagaatacacaatagagcgaaaagcctcaacttacgaccaggaagtgaaagacagaggaggtaggtaggcgatcccacaatcccctttgaggtcatacttcaaattacccaaagacttcccataatgccccacctctcaaaggttccctcacctcatgacaatatcatcttggggggaaagcctgaaacgcatggcccttggggacattcaacattcaaagacacctgtctccctgcattctgagtttcatgggtttagcctctgcagcagggatgcagttttatatttgggactgtactgtgagatgtgtaggacagagaggggtgtgggaagctgtagcaggcttttgtcttttaggccaccacccagctcccaaatcatgacacacggacttcttattggctttgagtgctcagccttagcttagctctcattttaatctgtttctttttatttacattttgtctcagggctttttacctttctttccttctgtgtgtcttactttcctgctgtctccgtgtctggctggcagctgcctgacttctggcctggaacatgtccctttcattcttccttttttctcttctctttctctcgttctctcctatttattctctctacccacaagccctgcctatgcctctttgcctggctattgccattcacctttttaatagaccaatcagatgccttaggcagccaaggtgaaacagaacacatctttacgtagttaacaaaggcagtataaacaaatataacataccttcacatagttaaagtaatattctgcagcataaacaaatgtaacacacctttgccctggtaaatacaacaggaagctccctggatatttcagacttcttcagagtactttgatctatcaatgtggctctttagctttcagcctgtcttgcaactaaggtaaagagcagcatcaccccagccagccaacgccatcaggaacaacacaggcattccagcagcaataaaaagagcacaggatctctcccctcttagagcgttcactgctgcttgcagaatccaagatagatccaaggtcatttatctctacagacattcttgttgaccaataggaggcttcagattaaacccattagttattgtcctccaagttgatctcaggatagaaactaaagaaaaacttctgtttttagaaattcagatgaaatgcatagaattttttgaaagctcctcttgagtgagaattagaaatgaaacatgctaaggtgctgaggagatggctccatgagtaagtcctggccacctgagttcaaatccccagaaccccagagtcaggagcagtagctggcactcctacagggacacaggaggcagaggcaaaattcccagaagctcatgggctagcctggcatatgctgcagagcacaacaagagagacattgtcacacacaaaaataaaataaaagtagatgacaagggtggacacctgggattgtcctctaacacatgcgcgcgcaggtatacacacacatacatgcgcaggtacacacacatacacttgcactcacacaaatgtacaataacctacatcatacataaatacacatttatgcacacaaacacaaaagagagaaggagagagggagaaggaaggaagggagggagagaggaggagggaagaagagagagagagagagagagagagagagagagagagagagagagagagagagaggagacatatgttaaaagagaagacaaatatcaaccagttctatgaagacaaccaggcccaaagtgaagctaatgaccacagggactcaactgcatggctgtggttgggatattccctcaaggctgctctgatgagaccatgcccctgacagactccggctctatcttcatggttcccatggttcatactaaactcacctttctgaaattggaggattctcacccagagcagggcagagtatggaataaagctggtagtcccttgacaaacaccacaagtatgttagccctgactctccttcattctgagaggatatcagctgttttaatatttgaggatggtgctgtggaaacagctcccctgtccctcaatagaaaccaatggcagggacaaccaacaattatctgattgctctttcactgaattcacaagcgatgggcacccattaacagagacctgttgaaatatcaaggtcatggaaagaatgccccagatgggagagacttcccagtcactatgaagtaaagtaaacactgttctgtgacaacccatttttcactagaaatactaaaattttaattgtggggaatctgtataaacactccaaagtcacatggaaactccaggggagcaaaagccaccagccagggaagcatattttctagggaatcaaggaccagaagctacctggagctgaaccccagctttcaggtggacaggagacctggcccctgcaatggcttaggcatgaagaggctaaagccaacagtaaatgcaaataatggtgaatcctgtgatttccacccctgaggagactcttattatgtcaggaatagtgatgtaactggattttgttttaattttacctagttttaaaatgaaaatgtgctatggggcccttaaataaggcaaactctaaagcgctaataaaatcaccatggtgtctaccactagcaataaccacactcaatgcagaggaacagacttccaaacattctgctgtacagacttgcccatacatgcacatatgcaaggacagataggcgagcacacatgtacagacatacaagtgcccatgcacacacataggccagcacacacccacatatacatgcacacacatgtacaatcacacatacatgcaaatacacatagatgcacatacagccatatgtgtgagtacacattcatgcatacataagctcacccacatgcaaacacacgtgtgtgcacacatacacacaaatgtacacatgtagatattttagatgactactttatgttcaacccgctgtcttataaaatgtttcatcagcattacagctacaggcatatagacctgtattgagtgttttaagtcataaacatatagatatttatatatagtataaaatatatatttattcaattacttatatttattataatttactacatccccaaatagcagattaaccagtttagttcttttagatttaagacatctttcttaggtaccatctttgctcaggaaaattgcatgtgtttgtgtgtgtatgtgtgtgtatctgtgtgtgtttaaagtgcatgcatatgcatgcattcacatgtgtacaggagtgtgctcacatcccatggctcacatgtagaggtcacaggacaacttctgctgtcagtcctcaccttcagccttgtttgagataaggcctctcttgtttcctactttgtgagccaggctgcccctcccctgcctaccccattccagcttctagggattctcctctctccatcccaccgtaggggtgctgggctcacagacatgcacaacacacccagcttttaccatggttctagagattcatgcctgaatcctcatgcttgtcgtgcattttgacccaatgagatgtctcccaaggcctcagaaaaattctcagagtggaactgtggggtttgaggaaagtccaattcttcacaaccttggcacatactgctaaccctgaaattgtctgttactacgggaactatttgaggattactgctagtgtgacaaaacaccatgatcaaagcaacctggggagggaaaggtttgtttggcttatacttccgcatcactgttcatcatggaaggttatcaggacaagatcctggaggcaggagctgaggtagaggccatggaaggatgcttcttcctggcttgctccccatggcttgttcagcctgctttcttatagaacccaggagcaccagcccagagatgacaccaccacaaagggccagaccctccctcttcaatatcaccaataaatcactaattaagaaaatactgtacatctagatattggggggaaatttactcagttgagattccctcctttcagatgactccagcctgtgtcaagttgccatagactagccagcacaggagcctcttgtccccatagtttcctgcctagctgatgaaaccctacctggggctgcgtcttggccaggctaggttctacccttccccaggaagcacaggtgtgcctgtcttctctagtgtctcccagagagaaggcatgcatctcagactttgtcagccctacagtcccatggtgggacaggaccctggctggggactcttctcttttgcagtctcaaaacgttgtctgccctccacatgggagacctgtgatgggacctgatacaagagtcgctactgttcctaacacaggcctgtgttctcagcaagtggcactgtgtagagaccccaagtaagcatctgtagcacacagtcaagagtcacccccttgttgtggtgtgcacaagtggctcttaccttgaaatgacccattttacctgcaggaaaaatttagcaacatctaaagacattttacattatcacaattgggacaatgtgttgccagggaccagtgagtgcaggccagagacactgctcacagacctcaaggacatagaacagcccatatgagagaaccacctggccaagtgtcaatggcgacagtcaaaaactcgtgatgcatactatgtagccctggctattcttggttctttgtctggggtttagtttcagtgcaagtgctcactatgtagcccaggatgccttcaaactcaaaatcctcctgcctcagcctcttaagccctgggtttacaggtatgcactaccatgcctgacttactttacccttgtagttattaatccggatggtcacctggtgagatttataatcaccatgggaacaagcctctgggcatgtctgtgatggagtgtctagattcaggtaactaagggaaggcccaccatcaaaggcaggaccatttccgggccaggaccctggacctggtacaaatggcaagttgagcttagcaagagcattcacgcctgtgctttctgacacgcaggtgcagcgtggccagcggcctcccgctcctgctgcattccccagtacagtagacaggacccccaaaccgtgagccaaaacaaaccttccttcctgaagttgctttggccaagtattcctgtcacagcaaggcaaaaagtaactaatatatcgccactgcctttccagtctctgctccctctctgacccagagtcacgatccacaaactgcctaccaacttttcatacagctggcgctggcacaatcaagcctggcttttcttcctgtgtctatttgaccatttaaacagcagatggtgaaaaacagctcctggcttccctgctgcagcaaaactttcacttcctgatatcattttagcataaagcctcctctccaaccacaagccaggagggacagggcaggggtctgaggtgagtagctcctctccagaagtcttttaacacacagttggcacagtgtttgcccagcatgtaaagccctgagttccatccccagtaccggataaaaccagacatgacggcaaaacctgtaatcccagaactctggaagtggccacagaagctcacttcagttacacaagaagttcaaggccagcctgggttacatgaagccctgtctcaaaaagtaataataaataattccagcactccacagaccaccccttctctctctccaccaccgttcagattagtcaagagcaggaataagacatctggaagcaactgaacccattctttcagtgcaccccactggctgtaggactacctgaaaggaactcatgcttactccagacatgagctcattccagttttccttggggttcgtcccctcagtaagcactcagtccatactatgggctaagcaaaaatgatgcccccaggagagaaaagcaatgagccatgaatgaaaaactgagagaaagcagatgggcacccaggataacagcccataatgtttctctactgcattggggtggcattcaggaaacactgaaagtctcaactgcagaggggtcttacttcaaaattgaattcatcacctacatgtgtgtgcacacaagcagacagctcaatctgcccctggtgatgaattagccatggtcagtttctttccctgtcactcacatggtttgatcacagcaaggaaagagccaagttctacctggctcaggactagaaaagccttcttttgcttgatcagaactatcatgaggagagtagctaagaatgggcagacagcagctgcaaaaggaaagctcctgggatggagaggaagtagccacagcacagaccaacattgcattattgagtgaactgctgatgtcagagcggcccccacactggctgcgatctagtctcaatgctcacagtgtcacctgtgagataggagcagctgccccctaggaacctactagaaatgctggctcaggcccctccctaaacctaactacagactgcatttttaacaagttcctaggtgattcatatacctattaaaatttgatgagcactgttctaaataaacgctcttaacaaaatatagaactctgaccccaagagggctgagggcttattcaatctatcaatcaacagaacacttcgtgacagccaattctgtgtgctgtgccagcctgaaccactgcacagactagaaagtaaaatagcatcgagggaatacagggttgtgatagttccctaccatcactgccaccgccaccgccaccgccaccgctgtcgccaccctgggagatcctgaacacaccacagtgggacacatgaaggacagacttggcctctacaggaccggtctccaaagaagtgcttgggatctagatgcacactggtaaggcggtgattgtgccccggctcccataggtcttcccaggagccgctgctgagaagtcggcaggcagatctgaatgaagatgaaagatcagggataatgggaaataaataagcagcaggttagagtggaatgagaaaaaatgaagggtagacgcagaggcctggaccccacaatgactttaataactgatttctgggctgccagaggcaatctccatcaatgaccatgggcagtgaatgagagacttgtagccattgtgactatgctccagctaggggttcatggctctcacagcctgacggggctgagtcttaaataagagtgctgggggagacggcaacccctgccccccacttccatgtggacttagagacttagaggtgctcagcaggcaggggatgagtaggaaggctgagagggccatctggttatctcctccctcccctcaccaccctcaccactgctcctgcctggcagagactgtatcccttcatgacagtggcgaatgacccccagggggggggacaaagtagtagtaggttgatgtgtgccaccttcacagtgagggcagagatcatggtgggacacaagggacgacctcaaggaggtgggcatgtgccaccgacctggtacaggaagaggctgtgggtgttgttaaccagcctacagcacagaaaaatgtggatgtgtcaagattccgagctgcatcccttccacgtggccttttcggggcagcagatcccctctgggttccctccccaccccgagtgggttccattaactcatgctgaaatcaataccaatcacagacttcagataagcgtttggcagcatgctagactcgtcactgacacaaggaccagtcatgaggggagacagtagtgcgcttgttctgggtgctaattcctggctgatatattgatagaggtagaggaagtgaagtaggtcttggagagttttgtctttgttttattttttggttttttagtttggggttttttttttttttttggttttggttttgatttttgattttagagacagggtttctctgtgtagctttggaggctgtcctggaactcgctcttgtagaccaggctggtctcaaactcccagagatccacctgcctctgcctcccaagtgctggggctgggattaaaggcttgtgccaccatcacctggcaggtcttgtagggtttatcctgtgctatgtggattccaattgttaggccatctgtttgttctcttcctgcctctcagattcccatatgtaacaataagtctttccgccagttgcccaagttctgcccaagttccgtctgccgtgttagggccccaaataacacacagagacttatattatttacaatgctgctggctaattgactaggatttctatctgctagctcaatcttaattatcagccataatcataatcataagacttatcttgagctggagagatggctcagaggttaagagcatgactgctcttccagaggtcctgagttcaattcccagcaaccacatggtggctcacaaccatccattatgaaatctggtgccctcttctggtgtggagatatacatggaagcagaatgttgtatacataataaataaacaatatataaaaaaagagaatcttaaaaaaaaaaagacttatcttatggaggactcaggcggaatgtgtcctatcttcctggcagtcacatggcaactccacagagaggaggaggaagagcaagagggagacttcctgtttgtccctgcttatgtatgagtctgcctgctatgttgattcctgcctgtatcacaagacttctttttactacatttcccagaatcctccttgactcctaatcctgcctaacttgctgcctcattggccaaacagtgctttattcaacaatcaataaaatgaacatatacagaaggacatttcccatcacccataccttatcatttcttcttaactaagtaaaggcttctccaaagactaactccaatcatacctctcccgtggctgaatcctaaattcctctacttgaaggtatgtttaacctacagccaacaccagatatttagaccttaacactttattatcttttatacatgttgttgcatgtatcctatttataataattataatatattaaaggacttagataacagggactggaccttgaactgtttttgttgttgttgtcttttttattttgttttggtttttcgagacagggtttctctgtgtagctttggaactatcctggaactcactctgtagaccaagtggtgccctcctttaatcccagcactggagaggcagaggcaggtggacccttgaactacttttattccaaatttttaacttaatttaatccaaatgtcaccttgaatgaactgtctttgagatttatttccatcactcaaatcattgaactcattagtgcttacttcttgttctgcttaacctgacttgagcaagcagtcactctgaaggtatcatgtggcagactgaacaacggcaaaagcaggattaaaatctactctcatgtgacaaaatttttaaaatgaaacaagataagcttcatagatttgaaaataaattgtcaagctttgccgaaactcttgacagtcttgtgatccaataagttttgcctgaggaagtcctagtaggcgaatatccttgctgtttaggctagcacttctttcatataaattctaggaaacctgggaacgttccagaaacacgcactgataactaatgtcccattttaatgtctccccaaaattttcagtatttccacatgcattatcttacttagtcctttactaaccaagcataaaggtaaatacacatcccatttttttaaaaaacatttacatttgatagtgagtgtcaggtgttattaagaatgtgacaaggattcatgtctgagatgcattcccacggatggatgtggtttccaccttcctaagaacgtgtccagacaacatggagaactgggttcagcttatgaaactgatgcagtagcatcatcaaccccacaaccaactccactatggccatgcctagtgtgtccattaccttccaacacatgagtacaaactactccccatttttctcctccggtccttctttcttaccttaaagttgaatgaaataacagatgggaactcagtagcagagaggtttcctagcatgtgtaatgccttagtatttggttctctggaaccacacacataagtaattgaattaacaagagttccgatgagaggttgatatgatgggaccatagcattcataaacaattaagaacacactgagaaaataccttgaaatatctgtttcaagcaccttagcaacaagagcagtgaggactgtgagttcaacaccccatggggaagggaatctcagagaaacaagcctgagatgtgatacagtttcctctcaaggtattcatcaattcacaagcaatagtgcagagtttgggacattagagtttttgtagttctcacagagatggaggataagcattggagtttagggtttcaaaggagaagagtccctggaaaatgtttcagaatcgtggttgtgacacagaatgactacagccaaggactagggatgacatcaaaatagacacatgaataataaaattcagtaagatcagccaggttcctacgtgaatccaggtaccaaactctgatgtcctgtcggaggcaaaggcaactctttctggtgataaatgacactcacaaacacactcagccttggaggtatatgccattcacaaactcagcctttgagatatatgcctgtgaccccagctctggagagctatggacaaaaaggacccctgaggcttgctggccagccagcctagccaaatggtgagctctgtgttcagtgagaaattgtctcaaagatgaggtgggggtgatgaaggaagacatctctggcctctgtatgcatgtacacagaaccagaacatacatgtacacacatatacccccatacacacatgcacgccctcctgaagatgaaaacaattaacataaccacacacgaaaataagtttgtccccggcaggaaacctgctgaggaattttcaattcagagtttttctgagacttccctagaaaagacagaattgactcattccagtcatgtaaatttttgtttcctagtgagtcatttcattcattcattcattcattcattcattcatccatgattttttgtgccaaagtcctaaagacaacatgccagttctagatatgaaaaaaaaaatcaatttttgctgtatttattaagctcaaaatctgggtgagagaacctgagtcagcagattttctcttcagctgagtcatgttagtggtgggaatcagccatgccagagggactccagagggcaggggtcagggtcagaggttgggttaatgttctattgtttatataataaactacctcaagctcatagcttccaacaattgacactcaacctctcccagtttctatgggccaggagtccacacatcacctacaaagggtctctacttaacatcacaagaaattggtcattagggccaggttgtatgtattcctgtctggaacctgggtcatcgtctaagatcacaagggtgtaagcaaacgtgaattatggatacagagctaaagatctttcctggatgctcatctggggccgttctcacctcttcagtccccactcaggtcctggccacacagccctgtcaggaaccattttacaacatagtagcatacttattaaagccaatagaattctagaccttcttccaaaggtttgcctaaattaaccagaccctctaggataatcttcctttgattcattaaaagccaattttattacatctgtaaaaactctcatttccatataatataacttgatcaagctactacttttgtcatattcacaggcacacaaaggcagggggtctatggagtatatgtgccagggagagcagaaccctggggtctgcattagaatctgcctctgctggcacctaccccacaagagaaccaggtgcagggagatggggtgcagggaggggaagaggtggctcagctaaattccccaacaattctgattgtcaccaatgagaatatctcaggacactcaaggaaaggctcggttgcttctctttctggctgtactacacagcagatgaggggcattccacagacagaaggacttcaggggcagatatgagattatcaccagatgcacagatgtctttgggtgaagaacaaagatttctgtcaatctataccccagagaaagggaacaaatggtatagttttgaatgctatccttcagaatcaatcattaaaccatggaaatggatagggttagtcaatatatgtgtggagacaagaaggatgaagactcagaccttagaaaactacatcatgaaagacaggagcagacagaagtatggaagggcaggctctggaaacagccagaaagagaagcaaggcttcaaacaggtgaccccagtgaccaaagctgcccagatgtgaagaccaaagggggcctgtgaactgcatgagttatagctttaagtcaaacataagaggcaatatttcagtggattagagggcggctggaccatgggagtgaaggtacaacagatccttttatgtgggcaagagggagaggatcggctttgcagggtgggatttggttaaaatggcagaattgatcctaactacagaggaagctgtaattctgtgtgttgaatcacagtgacacaagacaaccagaacaacaggtacacaaacccttcagaccacattcatggggtgatggggtatgtcagttaaaaaaaatctcttctctggaaaactctgatgaaccccttaaggtcacacctgggtcttcctttcagacaaaaccctggctcgccctctcctcgaagcatctctcacagaggtaatgtaattctccaattgttcttatgatccctgtgttgatttcccccactggcctgaaccccatgaaggatgagctgatgtttgatcagctcagagttatatccccggggcctcgaagaggtcctggtacctattagccactacgtaaacaggtactaaaaacgtacatcgaatgcttttattttagaactgaggaacctgagtctccaaagttaaaaagcccttgtcattgttacacaaggcctagaagcaggccgacagcctgtgtgttcattcccagcccttttgaaggaatactcacctcctactccagcactgtggcatttcctctgactaagcagggagcacacataagcacaatcctccagaatggatagctcgaggctatcagggtccaaccttgccatgcattcttcgaatgacaccaacatgctgtgattccaccagccctctttgtaaactgccacttggcaagtcctcactctgtactgagcagaaacagcttggggcatcatgtccattgactcactttattttcataatagttgataccattcttcttacacaaagaacagctaagtcttcgagaagtcaagtcacccagcaaagcttcggatgtcagggacaaatacagctctggcagaccccagaatgcagggcctcacctaccctgctgtggctctgagacgtttagcaactccgacgttctcttctgagaaccctctatttgtaaccatcctgttaggaatgaaatactctgagcagacacttgtgcccctccctttagctgtcagtctattgaaactggatcccaagaaattggaatttcctttggtggtccatactgatagatggaaaacattaggaaccttggggccagctagagagagtaacttgtctcctggcaagagacttcacacagttctgacaaactgtcaggccatcttgcagaagcaacgagggaagagacaatgatggatcacagacaggcaggacagcaccttggccacaactacttaattatgcatacttctgcatttgatgtatttgttcctctcccaaggcagccatattgaataaacacctattcttaattgcttgtctacttggttggcctattgaggactagtggccaagcctagcgtgtatggctgccagaacgcaggctctgaccataacacttgtaacaaactagggaaaatagattgactagtcaaagaagccaatgaacttcttcaaggcactgtggtgagttgctgtaaagttgtttaacataagtgaaatcactgttattcattttaaagtaatataaaattggtatataatatctatgaaaactattatatgaatatagatgtatgtgagtggtgtgtgtgtgtgtgtgtgtgtgcgtgtgtgtgtgtgtgtgtgcgtgtgtgtgtgtgtgtgtgtgtgtgcgtgcgtgtgtgtgtgtgtgtgtgtctgtgtatatgtgtgtgcgtgtgtgtgtgtgtgtgtnnnnnnnnnnnnnnnnnnnnnnnnnnnnnnnnnnnnnnnnnnnnnnnnnnnnnnnnnnnnnnnnnnnnnnnnnnnnnnnnnnnnnnnnnnnnnnnnnnnnnnnnnnnnnnnnnnnnnnnnnnnnnnnnnnnnnnnnnnnnnnnnnnnnnnnnnnnnnnnnnnnnnnnnnnnnnnnnnnnnnnnnnnnnnnnnnnnnnnnnnnnnnnnnnnnnnnnnnnnnnnnnnnnnnnnnnnnnnnnnnnnnnnnnnnnnnnnnnnnnnnnnnnnnnnnnnnnnnnnnnnnnnnnnnnnnnnnnnnnngtgtgtgtgtgtgtgtgtgtgtgtgtgtgtgcaatacccctgcatgctcatgtgcatatgcattagacacagacattagaaaccccctggccatgccacaggagggcagaagactggagagtgctaggttagcttttttaagtttacctctttcacactccctcttttgggaagagcagaatttattttttttttaagattaatagtgtctactatatttagcttcttacaacatatgcatatgtgtatatatacatatatataatcagctgtaaagaagttaaaacatcacctaaagatcaaaacaaaaccccatcccaaaagacccctgctaccgtattttatactacagcactttctggcatacttctctaagctttagtcagatgtctcacaggaactacgctacctatatagtttctatgtcttgctttattttattccagcttcttttactcattttttattaatttttttaacattccaatcctctcctcctgctccccccaggcccctgttacctcccatctgctcctcagagagagagtctaccaagtctgtcccatcatcccattgaggcaggaccaaggcaccgctccacccaatcccaccccacacccctgtgtctaggctgggcaaggtagctctccatatagaatgggctccactaagtcagtttgtgcgttaatgtagatcttggacccactgccaatggcctcatatattgtcccagtcacaccattgtcacctatcctaagagagtcttgttcggtcttatgcaggttccccatttgtcagactggagacagtgatctctcactagctcgggtcagctgatcctgtgggtttccccatcacggtcttgactcctttgttcatattcgcccctccctcactttgattgtactccaggagcctggcccattggttagttatggatttctgcatctgcttccatctgttctgaaggaggcttctggcttctctggggttgtggattgtaggctgggtatcttttgctttatgtctggtatcatttatgaatgagtacatactatatttgtctttctgattttgggtcacctcacccaggatggttttttagttctgtccatttgcctgaaaatcttagaatgtcgtcgtttcataccactgagtagtactccattgtgtaaatgtaccacattttctttatccaatcttcagtcgaggggcatctaggctgtttccaagatctggctaatacacataatgttgctatgggctggagagatggctcagccgttaaaggctaggctcacaaccaaaagcaaataatgttgctatgaacatagttgatcaaatgccgttgtggtgtgaatgagcctcctttgaggtccatgcccaacagtggtattgcagggtcctgaggtaggttgatccctaattttccaagaaattgccatactgatttccacagagactgtacaagtttgtactcccaccagcaatggaggagtgttccccattctccatatcctctccagcataaggggtcattggtgtttttatcgtaaccattctgataagtgtaagatggaatctgagtggttttgatttgcatttccctgatgagtaaggatgttgagcatttcctcaagtgtctttccgccgtttgagattgcatttattcttctatttcaagtctttcctaagcagaagtgtggccaaatcaaatgcctcactcgctcagaaccagaaaagcctgctttgagagatgaggaagtcggacattctaactatagattaaactacgtgtgacaaagacaatgcaactgatcaaagagtttgaggagaggatttctgttctcccctctaaagccaccacctggcagctgtgtgaagtgggagcctgtttagtcactgcaaatctaggtctgcatctgtacaatgatgccatgaaatgagctcctcccccaggcctgtaccttcaatgtgacagccatagagcagagcttgctggcaggtgagagcaggctacaaggacatcccccctgagctctctctggccccaaggtgacttttccagataaaaccacttagatgtactccagctcccctgagtctacaggcttcaaacttttcccacaagaaaaaaaaagttcccaaggggttgggactctccttgtcattttacctcttcctgccaatgcagtctaccaaacttgaaacttcatgacctctttatgtctgtttcttctaccactatcaccactcatcaccatatcctattgatgcttcttaggtcctgaccaattctgtatccatagggcatcattatccgaaacctacataattgcaatgacatccctgcttctaatgtggtatctgccaacctttccccgtggtgtttgtggagttacccatcagaaagagagagagaaaggatgaaaggaagaaaggaagaaagagagagagaaagaaggaaagaaagaaaggaagaaagagagagaaagaaagaaagaaggaaagaaaggaaggaaggaaggaaggaaggaaggaaggaaggaaggaaggaaggaggaagggagagaaaagagagagagagaagcaggaatggagcagtttctctttcagagggcctgggttaggttcccagcacctatgtggtagctcagaagcatccataactacagctccagggatctgacaccttcttccggcctcggttatcaccaggcacacacatggtacacatatatacatgttggcaaaaatattcctatacaaaataaaataaataaatcttaaaagtgctaagtcttatcaaataattcctaaagtacaaatttctctacattgcctgcagaacaaagttaaattcttcagtttgggattcaggcaacatacagagatggtccggtcttataactgtggacagatacaatcccttcacattgtactttgccactctcagtggcttaatttgtcatattcttacaatatgagcctgttaatctaggtattcagcaggacatccagctggtaaagagggacagtcatcttaggttgagaaaagccttgcttaggagcccatcaaagacttcatttcccatttgccaaccccaactgtctcttttgccaatgaggaaatcaagctccaataagagatttacaaccatcatgatgagccagaccaagtaagaaactctctgagagctgggttggaaccacttcttcagtaactccttcaggtggattttttgtttgtttgtttgtttgtttgttttcaagacagggtttctctgtattgctttgcagcctgtcctggaactctctctgtagcccaggctggccatgaactcacagagatctacctgcctctgcctcccgagtgctggtattaaaggcatgcgccaccaccgcccagctaggtggaatgttttaaagattttctcttcaagagggtggagtctgtgtgtgggtttgtgtatgtgagtgcagctacctaaaaaatccagaagtttccaatcctctggatctggagtttcaggcagtggagagccccccccccatcccaatggggtgctaagaatggaacttggattctctaaaagaacagtgtgtactcctaatcactaagacatctccccagccttgcttgtggacagattaaatcattttaaatgcatttgttctttgtttgtggttcctagcatagcattacagcagctatgataatagccttgaactgttgaaagtgttgggattaaatttaaaattctttcaacttagtcctttcttgtgttgcttctcaaacgaaatcatcattaaaaggcagaaatccctttcaggacattaaatgtgggaagagaacctacaatgcttccacttgctccacagttgacctatgatttcaaagaactcacattcgctttttcttccaaatcctggttccaatgcacgaaatgggtgtcctttgaaattacctacactgacaggaacttcaggcagtctctgtctctttcttctgaaccttccagcaactagtaggaggatcaggatacagggaatcaatcccattcagggactgatgacagccgccggaacaaagagaaaagcgtccctctgtctctgaacttccagattacagcagaataataacgtgcactttgcaggattgaaatgatcataaccaccaggcaatttggcagctagctgggatagtgctcatcagccagctttgcaaggaaatcagcatgggaccagccaacggggatcaagggcaaattgctttttcttactctaggggcctagaaaagaggagatgatgcctagccacttaaaatgtcatcagtggaaaccagagcctgagtcagaagcagcaatttgagctgctgctctcaactcctaagaatctgagggtgttagaagatggagttttaccagtgattgtcaaagactgataattcttcctttcccactgatgttctgagagtcctgcatttttagggatccaaatgagaagtcccacaggtgtgcactgagccacgctgcatctccaagacacaatatatgaaattgttctccattttgcaaaaattcagaagaaaagagcatttttggaaaatgggattgattgattgattgatttgacttaactacctggtaagaagccacagcacaataggtgccctcctgcgtcgtgtcctggacctcagtacacctgtaaccgtgacctgagatcccctgctcattaggaggcttgttcgttgtgctcatgaaaaagcaaggtggtctttcagctccaggagctcagaactgcagcattagcttttggatgcaaatggcaggtcaagggttccctgagcctgtctaaaactgaagagacctcgggcattcttccatcacacattctggtagagccactcacaaaaggaaagacaccttgacactttgaaggttgggggcggatctggccatataggagcactaacctccctcttctgatctctttgccatgtctttctcaaacaaactctaggaccttaaaatatcttattttaaaatgtctttttaaagacattttttcttttttctattacaacaaactacaaactacacattttccagttggcatgggctatatttgaaaaagcatatgagtgtgcataaatgtttaagcagtttacaacggcaattaagacagtcttgtctctatgattgtatccacatagctttctggggaagtcaaaattttcaaattccagttcaaagcaggcctggagaaatagatagaaaaattgtttctcatctcatcctgttgaacttgacattgtttacttagctggaactgcttcccaggggtctgttgtgttggtgtttccctccaggtctgcagacccctccatatatgacagaacccagccatgatgcccgacacctggatggaaatcattctgctctcttgagtttgacagagaaaaaaattccctagcatctgaagggttgtgttgtctgaacttaactcaagaaggaagcagccagagaaaacaattccctacactagctgatgaggaaagataatcagccaggtgcatgggaagttccagaacaggggacggtaatgacatttggtccaggatgggaagatacttaccccaaaagcatgaggacctggtgtgactccagagtccacattgtcagtgttactatggtgatggctacaataggcatccagtcccactgtttgccatgctctacaggctgaccttttgtgacccctccctgtacagaaggctccataacttcatacaagaacatttttttcttgtttattagttgtcctccttattgaatatgagctttagcattgaagatagaagaaagaggttatggaatttgcctccgtgacaagtacagctgctgaggccaggcatgtccctgaatggaggcctagagaggccattgtgtaaagctatgaagttgaagccttaattgccttggagacttcaagatgttggaaatgccagagccttgggaggtctgctgaggagagttgctaacagggagtggaatcggcccaagagaaagaagtgtgttgcagtccagaaagctgaaaggagttggagatctgaagagcgtttcaacatcagacatggaaatgcagagtttggaatttgcttagatcattttcagtcttgctttggtccagtaatttctcactatgttcccttctctacattggtaatgttatcctgtgccattatatgttggaaatatgtgatctgtttttttgaagagagtttgaactttggacttttaaacattgttgagactgtgatagactggagccttttgaaatcagactgaatgcaatttttacatatatatagctacaagccattgctgttcttcatagcaatggaaaccctaactaagatagaggataaagggattttaggggaattttactaatgaccaaacttacatcaggctactctgagcgttctctctctctctctctctctctctctctctctctctctctctctctctctcctttctttttctttctttaaaacacatgtgtcccagactggtccttaactcctatgtaaccaaacatgatcttgaagttttaatcctcttgcagtcacctttctagctctaggattacaggtcatgtgttatcttgtctgggattacaggccgtgggttgccatgtctggaattacaggtcatgtgttactatgtccaggattacaggccatgtgttaccatgtctggaattacaggtcatgtgttatcatgtctggaattacaggtcatgtgccaccctgtctgggattacaggtcatgttatgtagtgctggggatcaaacacaaggctttgtgtgtgttaagtgagcatcctgccacctcaactccatcagcagcactgactctggatctccttcttaagcaagacttgggttttgtgtgatacacagtgagtccactttcactgggaatcctttgaaccccattcagtgggacgtctcccttccttgatgtcacaactgtctgaaaagtagagaacagacatcaagatgcccaaaagcctttgaccccctgcaggatttcactctatatcctgacctatgttaatgtcttatgcaaaatgctccatccatctctgtgtctctgtgtctccagttattgacttttttttaagtactgggattaaatctatattttcacacaggctaagcagagtcctgctatagctagagccccagcccatttttttttaattttcctaaatgaccatataatgcttgagaaattagaaaagccaacatcatcctgaacaagaaaacattgcattccccatgctttctataacccttccctcatcaacacagacccgacccactggacacaacaggtctaatgtctgatgggacagttctcaaatacagtctcttgctattctccttctagaactgtctgatttcaaagtcctcctgcttctaagtcttgtcccaacagcctagacagtatttcttgattcattttacttaatttagccatgtttaaaaataccagtgtagcatctatatttcatcaggaccttttaaaatcttttctgatttttaaatctttttcttatgtgcatgtgtctgtgggtaacacagacctgagcacatacacacagaggccaaaggaggatgtcaagtgtcttgctctatcacactctgccttattctctctctcctctcactggacctggagcttggatggcagccaccaactcctagtgagcatccctcctgtctctgttccctgtggtgctgtgatatgtgtcaaacacagacacacccacccagatttttaaataatgggaatttgaacttggtgcttatgcagcaagtgctcttacccactgagtcatctctttagccctcttttaagttttaattagagtacatccattatacataataatggtctccttatgatgtttccacataagcatttaacgtcttttgactgcagtcaccctccatcactctctattgtcccctcacactcctgctgatcccatcttcttctcaactagttcccttccaactttcatgtctcttttattgtgaccagtggatttccttaggcttgcttaccagagcatgtgtgagaatgggggaattggtaggaccacgggcaccttactagtgtctacaccactgaagaaaatgtctctccctccttccaaccctgcaaccattgactgcctagaggacaccagggagtgcagggcctttggggcccctccacactatgtatttttgctatcatttatttctgttgttatgtctagcaccgggaccagtttggttttgaaagtctattcagcaagctatccagcctccccatgggcaggaaagtggcaccatcagacaacaggctacatgtttccaccacatttaccctgaagagattgggtcttgactggggacaaggacctgagatgaaacaacacctccagggaatcaactggagatgggggcagagtgctggaattgaccagtgacagtgtcaggggacattgactgagcactttccaagtgtcgcacagtctgagcagccatcactccactctctaccgtgatgtattgttcgtgtttggtgacttggggtccttcatttgagaggaggcacatacccttcatgtgactgacttatttctccaactgtaaggaagaaggccttggctgcagacccaaagctgtgctccccaccaggtttttcaggaataagaggaatctttaccgccatccctcattcccacgtctacctctcaatgggcttcaaactcctaagggcagacatgatttgtcagctccaggaaacctgaacataatgtctaatgaaggaataaattaattactgagaatcgagtcccaagattcaataaattccccatcaaataagaacagtgaaaattggactgagagagtggtgactcacctagagaccagacagagccctggtagctgtgacactggccatgcatttgaatcaaagatgtgtcatgtgggagaagacagtgataaacaagtcagctggctgtgagactatcaaaagctaactggagaacttagagatggggccgtgttgttgcttgaaagtgggggggcggttagacagaggagttcaaaacctacagtatgtgggggatcctaataaagatgaaagtggttatcaacattccctggattgaggaggggccaggagagctttggggtagcagccagctgtgtctcctccttggaaccacccctgaggtcagaataataacaatggaagacaggtaacagatccactggagccctgggtgccctctgccaggctggtccatatgtacgcagagctgaaacccaagagatgtagtgagatagaaaggccaaaacccaggcctacagccaacttcccatctgcatgttgatttccgctctttgaccgtctcttggggatttctgtgaagactgcagggcctcgtgtggaacaagactgagggaaccacaagcagctttgcaactctgacttaaagagtggagccccttccctgagggctagccctgccattggctggaatgactgctccccttttctctgctcacttctggctttgtccacaaaagggaccaaaactggagattgagaatgaatttgtccaggcctccgatggccaggtaaagacctttctctctcgcatgaagtctctggctctggtgagaatggggagtgacctgggttcttatgttgctaaagtaagctctgggaggaaaaagaacagattttcataaggtgaaatgaacggacatctgcaaaacatgctgtggtgtgtaacacctgtgtaacttgcatgccagcatacaggcacacacccattcacatgcaagcaggcttcattttgtcaagagagtaagttgactgttattctacacactggtgttattaatgtctgtgtgagatgctcagggctgattctaatcacttccccctaaatatcccacaaagacatatgtacatctctaacgtgggagcagcaagccacttacttggtgcaaacacactagatgccattctgctaagctgttgctggggctctctcccagcacaaactgaggttcagtcagaagccctggaagggatggtgagatcactggccatgcctgagtcctagcacagtgcactccacttatggaatgtgggaaacttggcaccttggggacaactttcacagtcacctgcttcttcagagcgccttatttctacaaaacatttgcagaaagaaacagcctctgagctgtcaatcaggaaacaccagcaaggagttcttccctctgatcccagtatgctaatgtccatagaaggtcaaggttggtaagaaaaagcttgaggccatcaggaccttctacatggagcacattcgggctagacttctccagttattaaccctgatcaagaaaagcaaccccagagcgacaacgctcaagggcatagcacaagctattgatatactcagagacacttaaattttattttctttgacaaataaagaagtaaatttttcatacagccatatttaacagagcatctgtagccagtcattgctacagacagggggtacatgtgacataagtggtgttcacagtgagaggactggcaacagtatcgcctacagaagaacctgtgctcaccaagtctacaactccatggccattaagtaatcagagttcaattttaaggatggcttgtgtttcttcttaatctctaaaaacactaaatcttcctttcctgtccagcagaatttctcaacctcagcaccagtgacagtttgagtcctgtcattcttctctgggggagggtcttgagcactgggggatattgagctgtgttgctggcctttcttctctctcaggcacacacatcctactgcccatgtgatgcatgcatccaggatagctagagccgtggcctaaaggttggccaccccttctcaatgccagtagcatcctcgcccctgttcttctcaatcatggctgagcatcaaagacaaaacttgccctggtggaagattactgctatagaatgtcttttaagtgtatgttaaggataattttaagagtaaagacaaaattcacaggacaggctcacagcacaactgtgaaagtttagagttaaataccaggacatgttttccaatagtcaatattgtgatgcccttgactgtgcttatagatctctggctatctggccaaggtaccatctaaaggcaagaatagagaagaaaggacatctccacactctttggcttccagaaaccggtgactaataagtggaatggtgtgagtggcactgctggttatgtaacatgactgatatatctataccttaaaaagttccaaagaaaaaggaaaaaccaagagagagaatatgaaaacagggaggaggcagggaggagagaggggagaggatcagagacaaagagatggaggcaagaagagagagagagagagagagagagagagagagagagagagagagaagacagaatagagagggggagtatgacgagagcgaagacatccgtaggttaagacatctttattgagataaacaccagccaaacgcaagccagagcgtgcccagaggcagaagctagggaggccagaaagaggggctccccacgtgtctgccaccccttaagaattctcccacatcatcctcaacctcccctgaccacgccctcatgggcgtggccaggcacacctttagcgactcctaggaggcggggctacagtgtctccctacaggggagcaagaaagcaaggtagggagaggaagaggaaggagatagacaaggagggagggaaggggagggagggagggaaggggagggagggagggaggatcaaccctacgacacagctcatttagagggagccaggagaaatgtggtagacaaatagagcagaggggtggctggtgagtacacaggaggtggaccattgaccagaacacgctggacacactcgtgctgttgttccacaggctacaatgagtctcttctgctcatggcagagctcaggctaaatgcccagagtcctttgtttggtgggtttggcattatctaaggggaaaaggccaactctcctttctctccatcagtgcactttaaaggaaacctcagtcatctgtttctgctgtcactcgatagccacagcatagctcagagagacttagttaccatgcagaaagttacatgaacattttaatatgcctcttcaagatggtcaggtcttttgtggagttatcttgcgggtttgatttgtttaaacaataaaaatgtggtttctcttggaaaagggaattgaaatgataatgagactaatagattccgagcctggcagagacctcacttatctgaatgtctcacatgaaggaaattgggtggaaccattatgacattcaaggacatgatcagccacgtgtccccatccgccccattgggtaacatagatggagcaaggacaatgagttctgccttcatctttctgatcatttcatctctctggtgcagaggcagcaacaactggaactgtgactagcttttattctaaccaaaataaaaggtggagggagaaagtagaagcaatggcaagcacctgactaaaacagtttctcaaaacgagataaagatgggcaagcaactgtttccccatcggaccccaagacagcagcagtctgtcgggttcactcctctgcttgttttgttttttagtttgtcgtgccatttctgacatggagaaaacattcaaaagagattacttcagctgagaaaatggctctacagctaaagaagaatgaggacttgagttaggatcccatgtggccttgtgcccctgtctcacagtattgtgaggcaaagacaagatcactggagcttgctggctggcagcctagctcaggttcagtaagacactggtctcaaggggctaagatggaaagtgatggatcaggacacttgacgttctcctctggcttccaggcatgcacagaggcacagtcagatacatgcacagacctcatacaccatacacggacaccatgcacacacacaaattattcacttactaacaaaaccacatgctttctgcactttagaaaagaaatgtaacagaaataatagatatttcttcacttaaattatctttttgagtattgtttatttgttaagatggggtctctgtagtccaggttgtcctcaaattctctatatagacaaagatagccctgagttcctgatcctcctgcctctactttccaagagttgggatgataggatcagctgaaatgtcatttttaaagtgagttttctaaaatggaaaataactataaatgtcttcctgattaaatggcctataagaataaccaatgaagaaaaggggaagagagaaacatgtaaagatccatgtgactggaagaaacagagtccagctaataaggacttcaacctcaagacaggtgtcctttgtcccaagcattctgtgggtgaatgatgtcaaggttggttcataagctttaacacaattgaaaaaggtagtacatgtatagtacctcgcatatatcaaaacagtattattaatacataaagaaattactagacatctaacctctgggaattatacaacaaatgtccattttggttatttaagttttaattgttaaatatttcaaacacaagggccagcaagctggctcagaaggtaaaggcatttgccaccaagtctggcagcctaaattcaatcccattgaaattcacatggtagacagagagaaccaacacctgcaagttgtcttttgactgccgcatgcatgcttacacacacacacacacacacacacacacacacacacacatatatatatatatatatatatatatatatatatgagactcatcatctaaagctattggggaggactgacaataactatataaacaaatcaattgaactgtgattgaaaaaaaatactgaaactggtataggtgcaatcaagtagggaacagaaaaaagaaagcgaaatccttagaggtgagtacaggtggtgattctggataggatggtgggtatgggcatcattgaagaggtagcattggagtgtagacttgaagatggtacactaatatgccaggagatctcctggaggaagagagctacaagcatagggaactaacagcacaaaggccccagtaagacgcaggctcggatacttaagggatgagagaaggaataacagaaacaagagtaagcaaagaaaaaaatgaaggacatgaagccaaaaaggtttcctatgggggtaaggactagcaagtgctggcagtttagaccactaactttgaaaacaaatgagaagccatcaaaacattttcagcgggagttggtactacagatggaaagctacaggctacattcccactagccccctttttgctttttactttgaaacacggcctccttgagttatccaggctggccttgaactcactctgactcactctgcatcccatataggccatattatccctaacagatgggattgaaggcttgagtcagcctgatttgtatctctaaaggagctaggttaccaagttgtaaagtagaactagagggaaatgtggagaccaatcagaagacaactgactctccctccccagaagccaccaattaccaggaaggggtgggacttggaggtccctccttcttcatgcgtcaatattgattggctgattttgtgcagacagccagctactgtgagttcatgagtgcagcagcccctggtcatgtccagaagtcattattttgccatagtctttataatctgtccacttcctccatgatggtctctaagccttgcagggaggggcatgatatacaggtcccatttgtggctgtgtgttccatggacacttattctctatacctgtatgcaattctttgtaatgggagaaattctgggatccaacagaggagggaaagataatgaaggaggaattgtggaagcacagaccttgacttgcacacggagatgggagttaacgagctttaggttagaccacacaacactgggagcaggcagaggcaagagcgatgctgacaggctcgctgaatgtgaaggggaaagtctgccaacacgctcttctgattgcttctacttcttagctaagcaggattcaaggtcagagggtgagaacgggagggagggagggctgtgaagtttgaaatggtgaaatggctatcaaggaatgtaagagagtggatgaataagggaaatggaccaagataatgaccctgggcaacattaagctctcatttcaagttcatattcatgaatataatgtcaaaccaggcatcaagagtgtgattttcacagttgcattcatctgtacagggatgtgccccaaataggtggagatgtagctagggtggggctgtcagtaaaaccatgatgtgggagaagaggggaggagcagagggtgcctttagatgagtaattataaagaaagctcattgtatggagtagcggtgagggggtcatgaaaatcaagtaggatcaggtcattgtggggtccttctgagattgaagggttgctggcattcaagattctaagggaaaaggtgaaaagattggttgccaggagcaagaattgtgatacacagaatagattgtgggatgcaagacacaagtgtttaaagggatcatagatgatttgaagaggagttgtaaggtggacacaggaaaaggagctgtaagatggaaataggaagaggagctgtgaggtggagaaagattattattccaggaccagggtttagaaattacagacaggaaatctcaggataatgttctgtgaaaggagaaatggaacagtgttgtttaccaacgtcatcagatctctagaactgttcaagcagagatggcacaaccctggcttctgtgagtgacttacaagaaaggttcctgcagtaaatggattgtatttgaaagctgtgcagcactgatcctgcctgaagcttctccctttgcctcgttgtaaacttctaaaaggggcacacaataatgtaatggcatttgctcatggagttgccctccctgctctaggtcccttccatcttctgggtgacaggaccacagaagtcctataatctgccacttaagccattcttaaaaatagcctttccgcaggaccctcccaaatgatggagagagaggatggaatagggaatccaaatgcatggacccttgctctgactcctccatccacagtgtcttcctcaatgactctctgggactgggaccttccctgtttggtcacccacagggaggcttttctcttcctctcacacaacactcttaagacaactcaaaaccaaccagcctgtttgacctcccagtctggcccttcctgtactaacagagttatcacctttctcctccaagccatcttagcagtacacattgttgtcaaaggagacacatttcccaacctactatatttcaaagagatctctcctcaataattctttccccatgtgaaaaggggttagcacaagaaagaattgccgacttggtctagaaagactggtatcccacagacagagattatctctgataaaccaaagactgccatccaatggcccatgttttactaggaagaatgttcagttggccaacagttgttcttattcagttccctttggtccttggcagcttttccttcggtctctgtaaatcatgagcaacccatggggattgcttctctgtgaacctcatccactcagcttgttagtaagcatattgagaaccatttctataggtcgaagcttgatagggcaggaacactgagtcttctgtgacctatatatggtctgctaatagtttagcagacgcaatgcttattgggtaatggactgctttcccagagttataaaccaatgtctcgttttccacctggctagcattgcatgggttctggcccctaaaatccagggcaagggaggtaagtagcaattctccacacacacaccccactcagaaactggacagtttactttcaagttctgacctttcaatgcagagatgtttcacttccacacaagatttcatagcagggacatctctttataaatccttctagcacccaccacagtgtcacacaagtaattaatattcaacagagcaatgttatactcacatagtgataaatgcatataaagtagatcccaaggagtcagaactagtttgaaaacagatggtttattaggaagtattcacacaacggagccagtcctgttcagccaggcgggagagggaaaagagagctgcatgcgtgtgtccctgatatttaaagccttgctacatcactctgaccattcccatagtgggcgtggtcagtgccacctgtgccagccccccaagtgggcgtggtcagcatttccccctacactcatgtgtggtggtatgagtgtaattggcccccataaacctaaagggtgtggcttgttggagtaggtatgtatggccttattggaggaagtgcatcactgtggggctgggctttgaggtcccctatgctcaagctatgaccaatgacacagttcacttcctgctgcctgaggatcgaaacatagaactctcagttccttctccagcaccatgtctgcctgcatgctgccgtgtcccaccgtgataattgaataaaactctgaactgtaagccactccaatcaaatggtttttttctttaaaacagtttccataatcatagtgtctcttcaatagaaaccctaattaaaacaccatgaatcactaactgtgccctggtgtcaccaggtccctgagaaagacttgctgtcatattatgagcatctcagtggatgaatttttaaaaaggacatctgaattcccagtgtctttcatttgttcttcctattggaataggggccagggaacctctctcaccacaacacttcagaaacaatatatattacatctctggtccatttcattgaacatataaagcaaggtcactaagtcatttggtccctgtcatcatatccactgaaagggaagatggctgtgctgtcatctactgcttagaatcaaaacaaacgacattaacgggtctttaatcttctcattaaggcaggcatttggactgagaactgttacagttctgcagtgaatgtgggaaaagaagcttctgtgggttttttttttccctagcaagactgggaaagctctgttgtcctatgtagctacagtgtgcacacatgcagggacatgtgcacatgtgtgagcgtgaatatggagaccagaggcaacatcagatgtgttcctaaatcatcccctgccttacttcctgagacagggtctctctctcattgaacctacagctggactggctgagctgtgagcttcgggaatccaccagcgtccgcaccaggactacatacgcatgcttctgtgccctcactccaagtgaattcttggggatctgagcttaggtctccatgcttacacaccaagctctctactgcctgagcccttttcccagccggtatgtaactattttttgagggaagaaggggaaacactgatcatattttaccttctttctttgctttggggtgagcccatctttactttcaagcaccatcatggtgctgaagaaggacccttatacagaaggaccacctgaggctgctttaaactgtgaagccaatagaagcaggcatgggaagccgcctgtaacctctgcactggggagactgaggcaagaccatcatgagtcagaggccaatgtaacctacatagaaagaccctgcagagagatcctgaaccaagtgtactggtcatatctaattaacagcctctaaacttgacctttggcagctatgctaattaccagagaagcacacattcaacagatactatatccatttgcatgtcagcagcctcgcacactaaagtagccagtaaaattctccaacccttagcactagagaaaatatactagcagtattagataatactgctcataatttctttaattttctttattgctggtactggtagtcaaacccaaggtctcaacattgcttggcaaatacctcaccactgagctaagccccaagtccacttggaatgccacttttccaactcaattttcttgctttaggagctgtctagaaagcaagagtgaaatgaaaaccagccacctgccttgcttgtagattcattcacagttactggcagtcataagaccactctgttaattaagttgccagttatagcacctaccagaactccacaaatcaaatgtaacttaagatgtgcacaaggtgatcttctgacctcctcacacatatgtactttctcacacatgaactcatgcatacacaatatacacctagacaacacccacaaagaccaggcaaagctgccaatgctcctgaaggactggtactggcttagcattgcttctggggtagtgaattggtcagcacaatctcagaccagcccagattcaagactccgcttctcgacaggagagaggaaatgaataggtggctgtcttgcagtttctattactgtgaagagacactataaccatggtaactcttataaggaaatcatttaattggggtgactcacaatttcagaggttcagtccattatcatcataaggggagcacggaggcacgcaggcagacatggtgctggagtaactgagagagcccaacatcttataggcaacagatagtcaactggaagtcacactgagggaagcttgagcaaaagagacctcaaagcctgcccccacagtgacacacttcctccagcaaggccacatctcctaatagtaccactccctttgggagtcattttctttcaaaccaccacattccactccctggcccccaaaggcttatagccatatcattatgcaaaaaaaaaaaaaaatgcatccagtccaacttcaaaagtccccataatctattacagtctcaaacttatttcaaagtacaaagtctcttccaatctagcaacatcttaactgtaatccccctggaaaaatcaaaatcaaaaagcagatcacatacttctaacatataatggcatagcatacacattaccattccaaaacacggggaagggagcatagtgagtaataccaaaaacaagaccaaaaaccagctggggaaactccaaactcgacagcaaaatgtctaatgtcaaaaaaacttcaagtctccaactctgttcagctttgttgactgcaactcatttctttctcttgggctggttccactccctgttagcagctctcctccgcaagcatcccacgactctggcttcttgggttccccaagacaatccaggcttcaacttcacagcttcacctaatggcctcgctatgaggcttccattcagtgacacccctgacacatgcctggccttggcagctttattccatagcccctttcttctattcttaactctaaagccagaatcacatggcagaagctgccaagttctgctacttgctggggctggagcatggcccccttgtttaatgataccttcaccagctttcggtttctttcaccgtctaatcttggtggtccttaaaattgttcggtaaaccaggctggcctcaaactcagagattcactagcctctgccttcccagtgctggacttaaagatgcacaccacacccagctctaagcttttctttagttccttttcacaagttgggaatttagctgtttgggatcttgtgctgaggtcacgacttcctttattccatttcttaatccatttatctccttgaacatagaatttagctccattccactttctggtgttttttttttctcctcatatttttcattttgtaatttatcctggtcagcttgctccttttcattataaatcttcattagagttactactaatatccataacaacagagtctgtactaggctgctttgagatttcttctgccagtagaattaatccaaaactcttcactttagcctcaggtagactccttggacaagggcaaatggcagtcacttccttcacaaaaatatcagaacaatgacctctaggcaacataccaaattcttctcctctgaaacctcttaggtgagccccccatacttcaaataactcttaacatctctgtcttccatgctcctactcatatggcccattaagccttgcttaaagcatcccactgctttcataacccaaagtaccaaagtccaaattcctccaaacgaaaacatggtcaggcctgtcacagcaataccccagtccctggtgccaacttctgtcttagttggggttttcattgcatggcaactcttacaaaaaaaaaaaaaaaaaaaaaaaaaaaaacatttaattggggcggcacacttatagtttcagaggttcagtccattgtcatcatgatggggagcatggtgctagagtggagattgctaccctttataggaaataggaagtcaaatgactgtcacactgagggaagcttgagcaaaagagaccctaaagcccaaccccacagtgacactcttcctccaacaaggccactcttcctaatagtgccaatccctttgggggccacttttttcaaaccaccacagtggccatctctaatctgccatacagaaggctagcaatttgttcaagattaggaagaaaataagtgcttgtggttgtttcaatgagaatatcttcccataagctctagtatttgaacacttggttccccagtcggtgataccgttagagtaggtttagaaggtgtagcttgctgcaggaagcaagtccctggggacaggctttgagagtttaaaactactcatggcacttctctcggcttagtgcttgttgttgacaggtgagctctcctgctcctgctaccacacctgctgctcagtgccatatttcccgtcatgatggactcttatcccttgggaaccataagccaaaaataaactctgtcttccttatgctgcctcgatgggggtgctttatcacagtagcagagagtaattaatgcaatgcttgagctgggcctcagctctgttcagtcagacccggggctcattagcacccagcctactcccgtctcacttcccatgcgtgcacttctgcacagctgctgacacaggacagaagtgagcctagtccagcctcctccccacaacagcagtatcccaaggcacaggctgtctgaggaccttggcccttcactgaatccaaaggaaattctttgggtacagggacccaggctccatgccctaggactgagttcccctgaccctgacatagagagtttgagctttgtaaaataactccaataactcaggatttttatgcagattattaagtacactacagaaatgacaagtgaaaattcaaagaagcaggtgcagcgttttgctgtgacaccaagttttaggtcaggccaagcacagaaatcacctgggggctttacttaaacagtggtggggtagcagggagcatggctgctgcatggaatcctatgcctgcatggagacctgcaatgggatttgattgcccagagactggcaagaagtaatcactaagcaggcaatggtcctaaggaccctgtctgtagagaacagagaaaacatggggtggaacttcaggcaatggaaggcacagtgaagagaaaagatattgagaagacagcatcccctgtccccgaaggaatggccagaggccatggggagggagtattcatattctgactaccttttgctcacctcagggtacctggtcttgctcactcttccctgaaatgattatagctccttggtaccactcaggttccttggcccctggccctggggagagccacacctttccaagcactttgcctccctgtagcttgtactatccttctccccagagctagtgtcttggttacagagcttttcattaatcattgagcagccacccctgatctgcagggacatcgttgccatctctaagaagcctctgtccatccacggtcattactagaaatgcacaaattgccacacacattttcatttgctcaaggcggttgtttttatgaacagcggtgaaaacaaaaatcccattatgtccaagttaattcccctgcagtgcacggatagatgctctttggaggcagtgcatcagaccagctgcagcctgaccaaattaaactttcagtgaggcattcactattagaatttccatcatagctgctccttccatgtaccctaaaccaccgtatccgggtgaagcctacaatgagacagagcctacctatttgcatcactcatccagcagctaaaatagactaccattaggtaaccccaaccagtgtgttccaacctccaaagaattatgactcgagggacagctcacatcacactactcagctgtgactcaccgtccttttgctgtcaatctgctctctcagggatactttttgaccaggtatctctccaccgcttcccaccggcctggtcacacttgggaaccattgcagccacaaagccctgcagtggagagaggcaggtatggtttcattatgctgatgaggctttctctaagggattaaagaagaaagcctgtgtgtttcttctcttcaggtgaaaggggaaaggcatggagagcttgagaacagaaaagactgcagatgaggagggcatggccacctcatccactcactgggatgaagatgctcccagccgtgagaggaatgaggacctgctcagacaaaggcttccttttggcttagagagagttcagaagagagagtggaagcatcttttccccactcctccccagtcattttagtctgtacaaaataaatttgatccagcaatagcaatgtctgttgctcttacaacagtttaaaaagatgtcgaggtcactgttttaaagtaccactggagtcgagaatgctaacatttgtcaagaatgacttgcccctataaggaaacaacagcaacaaaaaaagtctatgaaggaaggaatatcatttaccagctctgaatgattccaactggctagacgattctgtctctccacaaatctgaacaagattgtcactcagcaagtctcaatgacctgtaagcccactgggacaaagaacatgggaagaaaagaatgagagcagaggccatggttgagcctcagagatggctgcatatggatcaagcagaatctgatagccagttgaaaaagacagcagtgttacatggtggctgagaaactacagagaagatacagctgacaagtcagagagattgtccagagcaacggttcccaaccttcctaatgctgccaccctcctctaatacagttcctctcgttgggatgaccccccaccgtaacattacttcgttgctacttcctaactgtaattttgctactgttatggattgtaatgtaatatctgatatgcaggacatctgatgtgcgactcctgtaggggttgcaacccacaggttgagagccactgatttttgacactacttaaatcatttgagacccttcacgggctgcctatggtcattcctcatagtactcatagttgaaaatgaataatgaaagtaacatgaactccaaaacccaacagagaaaggagagcacgtaggtagagagatggcccaggggttagaccagcattcagacctcagcatccatttggattgctcacaatcagttgtaagtacaagtccatggacccagcaccctattctagattcctcgggtgtatattcactttcatacatgaacactcacacacacacacacacacacacacacacacacacacacacacacacacttttttttaaggaggagtatatcccagaattcttagacaattagctgtattggagctatctgcagtgttagggtttaaggtagattttccatgcctaaatcctacttctcactgtcccctgatggcctttccaatagagactacacaaagcaaaatacatttattctcataactgagggtctaagagtctaaaaacaacaagactttggggcaaaaccaaatagtaccacaaggttcaggacagaagacctaagtggggtctcccacctcatgcctatgtttcagcaaacactccagaagtgggggatatggcagatttcccaagcctgcagtctgctgaacaatgtcaacagaactctgtgtcaccagagactcaaactaaacactgtgcattgacaacccttccctcccaagggaatggagtagctgtgcagttaaagaagtaaagaatgtcaggacttgtctcagttaaggaggtatctgcgttcattgctctccattaatttaaaaactgttgaaatgtaagaaaacataaaggctgaagtaaacaagaaaatttatcaataagtttatttctttgttgagttctttctaaaggaagccggagagcccacatgctgagctaagaggccaatgcagcctcagatcccttcccagctccacaggtgaccacctagtctcaaggcaaggcagtactggaagcaaaggtcagctagcagagctaccccaaggccaatagagactttcaggaagtgtttttgttgtggtttggtttggtttggtttggtttggtttggtttggtttggtttggtttggtttggtttttcaagacagggttactctgcatagttttgtagaccaggctgacctctaactcacaaagatcagcctgcctctgcctctgcctctgcctccagagtgctgggtttaaaggtgttcgccaccatcgcccagttctcaggaagtggtttaacagtacaggaaagactgtgtcttcatcatttagcaaccaggcactaatccatggaaccttatcagatagaccatgctaattggatgatagcaagcatctcttcaaagctcccatagcccatgtgtagttagggcaaggggagccttcagctatggcttgatgctttgcaagcctgactcaggagcttttcatacccatgaaatatgctcacagcccaaaatatgttcaaaggtttggctcactgaccaactgcctgagagtggaagtgtccttggaccacacactgtgccctctctattctgcccatagcagaaatacaggatgcttgagccacacaaggactggtatccaccagtaagtgatacaaaagagggaggaaaagagaaaaatgtctctgtcttgaagcttccatgttcacttctttgagctctcaaaggtgccttgagtctgacttgaaggtcaaggaggggtaaagtgggcagggtgcccccacccctgccttcaaccacagctactcaattgcagactcatttgtgcagacctatgccagcttttatttggcaaacggccgaggtctctgaacagagctgttttagaaaggataaagaatataaattcctcatagaacatgaagcagggctctcggcctccggtgtaaccaattatatagattgatccgagcatagctgactgagaactgcagctactgacttacttatcctctgttctcttgcccacagctcaaaaatcccacagtccgggcgtgtgaaggaaagagacccagcctcacacacaggagatgtgatgttttgtttaccagtggtatcatctccctgggcttttctttggtgtgtgtgtgtgtgtgtgtgtgtgtgtgtgtgtgtgtgtgtgtgtatacatgtgcaaatttgtgcacaggcccaagtgtagtagctcatacatatgtagatgcatgtatacacatatatgtacacacacacacacacacacacacacacacacacacacacacacgagtgtctgtatgtggaagccagatgataacttcaggagttgtgcctcagttacgctcctccatttttcctacttagactcatttatttctattttatatgtatgggtattttgcctacttttatatgtgtgtgccatgagtatttgtctggtccccacagatgtcagaagagggtatcagataccctagacctgaagttatagagggttctgagccaggatgtgggtgcaagtaaccaaaactggatccctggatcctctataagagtactgagtacttttgaggcagagtctctctctctctctctctctctctctctctctctctctctctctctctctctctctctctgtctctctctctctctgagacctgtggcttaacaggtaggcttaacctggctggtcaacaagccccaaagatctgcctgtgtggccttcagatacagtgtgtgctgccatgcctagatttttacacgggttctaactgaactcggtcttagtgctcacaaggaaaacgctttaccgactgagctttctctccacccttcctttggttttcttaactgtaaaagaacatgatgtgtcatcccctgcctgctatccagggttctgaggacaatttatatggaagaatttcccatgaaaaagcactgtaaaaactgtttgctccttgtaaacatgcatctctagatggtccactgtcagcagagcccagcacacacttcagtcaaggaatcactgattcaagaggagccagactcatgccacctgcaggtaggcagggataggccaataagttagacttaaatggagggcatgagtactacagaaatcatgggataaaggaactgggggccctgtcttccactgggctcatagatactctcaagaccacccaggtcagaattagaagtgctcagaagctctctggggggatccgtcggaggggttcccattcactgatttcacatgcagctactgccccagagctgaagagagccaaggggctttgcaccattatccgatcagccaagagggtgtggacagaggatagtatagacctataactgtgggggttaagaacaagagagcattggccatgaggttcaagaaggaaacgggcgatatgccgctgctaggactagggtgggaacagaggaagaaaatgccttgtcattctcacaagggggtggggatctatctatctatctatctatctatctatctatctatctatctaactatcatccttcttagataggcaaataccagacagcaagcgatctaattagcggaatgcagccatgccctgtcagtagcttcttaaacaccatcatcagatcatccaacccactcacccccaagtgctcccagctcctctacagcagctgcaggtggagctgtgaaaggcaccgagcattccaaaccatctatgttttaaactgccagttaagctcaggcacatatgcaaggcgctactctaagatgcaggggtccgtgtggcactcctaaaagttatctcccaagcagctgtgtatccccaaaccactgtcatcatcttaatcaatggcaccaggaagtccacatgctccacagaaggacctatggttataaactcagagtcagatcactgaaaagcaagcgtggataacaagagagaagtcaaaccataatcaagctgcgtaatgaagggcgctgttgcccgttgcatacgaagcaagattggctagaggtgcgattgcattgaaccatgaaaactgggagggattccggtgtgttcacgattatacatgacccttaaatactgccttgctactttcaaagcccttacacgtcatgatcaaatctgaagctcacaaaacttcttgaatgcaggcagcacaggtgtgggtcccatttaacaagtgggaaaaccatagtccaaaatgttatatgacttttctataatcacacagctggtgacagggttgaccctagtttgggcctccatgtgtccacctcggtactttcttattaggaaaatctgccgccatgagaactggatggagggagatgaaaagcttgggagagtggctctgtggaagagcattaccctagcatgcacacggccctgggttcaatcccaggaccatgaaaaaacaacaaagtctcagaggaagctttaggctgtcaaacttctagaaatggcccatcagaaacaaactggcccaagaagaaggtcaagaaacaagagccatggaactagtgagatgattctggggttaaaagtagctgctgctctttcagaggacccaggttcaattgcctgtacccatgaggcagttcaccaccatccacaactctggttccatgggatctaacaatctcttgtggcctctgtgacacaaggtatacatgtggtacacagacaggcaagcaaaacatccttacacaattaattaattaattttttataaaaaagaaagaaatgtcagaaggccatcatccctcaacagctcatcttgaaaaatccacctggaccccatcctattttacctgttttccaacaaacccacttggacacagagatgctaaaggatggagttcatggcacatctaaggcccggcataaactaggaaagtctcagaccctgccaccatcaggttaagtgataattaactgcattgctgagtgcccactggctagcaagccttgaggaaaaaggaaggagaacccacaaatgaagtataactcactgctctgccctggggaagccagaaaaaccagctctcccaaggcaaagatgcgatcacagttgagaccacacttccctctaacgcccctgggaattctgtgttttaccagctacatctgtttcctatgggtcattgtttgcttccacctgaatttattgcacccacctcatcactcttcactgaccaaaacagagccattttaggtgccagcaagatggctcagcaggtaaaggtgcctgctaccaaatctgaggacctgagtttgatcctagagatcacatggtagaaggagagaactaaaccctgagagctgtcctctgacactacttatgctctgtggtatgtgtacatgcacacacacacacacatgcacagagagagagagagagagagagagagagagagagagagagagagtcacacactaaagaaatatataaatataataaataaataaatggaagtcattttaaaagtctctacaccaattttgagaattactatttgcaaagtccattcaaactaacttccctgtacattttctaaggaagtgtgtgtgtgtgtgtgtgtgtgtgtgtgtgtgtgtgtgtgtgttgtacatgtgtgcctgcacgtgtttgcctgtttgcctaatgcccaagcaagaagcattgcctttcccacgtactatctaactcaacccagcatacaaggcaagcaaagcacaagtttgagttctgcaaaattgggttcattaataaaaagcattttacaccaagtactaaatgagctaccagggctgtaggacagcttggagtatgcagtcacaccttagcagagagtgaatgagcaaattgttccgatagcttcttccgtttgctcagagcaggatcagtcttcccatcattccactatcttttattccattgtaatacgatgtaatatttccctctcaatgctcatgaaatactaccctcgggttccaggttaaaatacagccctaaatcttataaagaaaacgggaggaggcagcaaaatagatgtgacattgccaaagaaacagcccacccaaccaaccctggaggccatgggttttcaacaggccaggaggaaacccaggctctgcccctgtgaaagcagtatctcaatccatcaacacagctccagctggtccctcttgccctgtggaagatcaaggctaattaggttgccagatgacctaagcatgttaaacatgttgagagacaggtttctaacctctaaagcagattgtaccactaaagcctctatttggatttgggcagaactgctccaaccttccccagaatcgctagtggcctctgcaaagaggggggaagagaccaaatgcttgctaagcatacggagcattgtgtcctcttaattcagggtttcacagcaacagcactattgacactgtgggccaggtaatagtccacacagtcctgtgttggtgtgccaggactgctgtaaataaataccacaaacagagttgctgaacacaacagagattcattccttcatacttctgggggatttccggaagtctggtgtcaaggtgttagtaggattggcccttcctctggacactgagggagtatacattccatgctgctctccaagctttctgacaatggccagtattagggattaactccgaaatacaccatatttaggctcatgctttcaacacctgagccccagattgcccatcgttctgaagactatggaaccatcagacggtgggacctggctggtaagagtaggttcagggggtggctcttgaccttgttctggtgtagccctcgctgcttcctgtctgttataacatgaacaagctcatacctccaatgtcagagtctgagctgctctcaacacagatttctttccatcttccccattgcagtggactgagatctgtctgaaaccacaagctacaattaagccttcctcccttaagctgtttctgccaggcccttggtcaccgccacatgaagcctaactcatacaaacagtactccttggtgctccttggctggtgtgaagcatcactccagtctctgctttccctcctcctggcttttcttagtctctgtcatcatagcatcacctgggaataagcagccagatcagttctggggtgcagagtattaggattcccaggtatctttttagggagacatggtggactctatgaaaaagagcgcccttggcatgcggtggggttagcagcattgtcactccatgcccctcatgtcagcatcatcccagacactgtccaatgtctctaccagcagaaatgttctggttgagaagcaattaaggctttgggtcagaaagacgaaagtttgatcttgatcccaatgcctggtgctgtgaccttggaaaactttggccacactttcttctcttcacctcacttggctactggtttgcagtgttgttgggtattacaatgagactgcatgaaaagcaattgctgagacaaacgagagccaagaaacagtggctgctgtatttcatgcaacagggacgtttctttggcaagattctccacaagcctcctgatttactacccttgacccctgagatccaaaaaggcaaagttgctgccccaggtgttctctacaggagccaaacacccccacagagcccagccaatgccttcccggtgactataaccccagatctgcagatcgctgtaaatcaaagcgacttggagggctggtgtgtccagagtgctaatgtgactgccctgcactgtggatggtatcagcccgagaggactcgagaaaatttcctggaggagacaaggtaggggaaggaagaaggtaggtggcgaggcagaccttgccttctgtaccatgacatggctgactacctgaaatctcacgctgaggctgcccctcattgctgagggactgatctcacccctcactgagccagagaaagacagaagcagcatcacgttcacttgcctgccattgatgctaaaaaccaatgtctgtcacatgacagaggcagagaaggtgtttcttagtgagctacccctgtgctaccgagattgccagcctctttgatggaagtagcaaagaaccaggcccatctctgtatttcttggtagggttcttattttttagatttctgcccatcaagtaattcctgaacattctcaaggaatacatccactattctatcctagtgacatatatcccttccatcagaaatcatagaagttacttcttgtcatcttttcattggactttctaagattcaagtatgcatttaagatccttacgtatttaagatgcttagttttgtgtatgtatggggtatgcatgtaagtgcaagtgcccaagaaagctacaggaattaggtccctctggagctggagtgacatccagttgtgtgagctgaccacgtggacactaggaactgagcccccagttctgggaaagcagtattcactcttgaccactgagacacctctccagacccttagctggtacctggggcacactctgtatgattgcaactgaatacagaccacgccactctagctgagttctcagtgcactgctaagggcaggcaacagcacataactgctccctcgccaaagacttggagaggccacagtattttcatctgcaactaccaatggctactccaaagtcaccttccttttcctgcctgctcctccatgggctatgtgggatagggactccctatccccttaggaatctctaaaccttcctctgtccaggtcatagcttcattccagtttggggcagaataacaggaccccaccatctcactgcccatcccagaatgattggcaacagaaacctcttcagggacaagggactcttgtcactattgtcccactccccaagtcactgtatttatcaataacttttaacatgtggattcattccatcttgactattaacaataagaggcattgcttctaaagtcctagtaacacaactcccatcccagacccaatccttgtcagttaatcctctggaaatgatcaagcctacccacccctcatgacgtaggacaaataaatctggttcccagaacaccaaatcaccaagaaaaaagaaaggaaaagccatccaacataaggtttaactcgaatcacaaagccaggaattcaggatctcggtgtgcagtgtgtctactgactggtctgaacttccctcactgcactgggttgagttacacctcaactttgcctagtgaaagatatcaatctaaggttggttccttagactacggaatatattggaatttcttgtttgattggcgatcacaaccaaaattccttcctaggtctagagaggtgtctctgtggtgaagaatgcatggttctcttgcagagatctgagttcagttcccagcatccatgtggggcagttcacagcagcctgcaactccaactccaggggatcaaacgccctcttctggcctctgaggcacctgcactcacatacacacagacacatgcacataattaaaaataaaagtaaaactttttttaaagctcccttcccatttgagggaacattctttgtgtaaagccaccaaagctaaatgcaggtgattattattccttccacaccttggcaaccaaatcaagggcaggtctcctgcagtgactctttgcagggctcactgcaggctgtgcctgcctgcacgttacagtcatcctggatctaagtctccattgcagcagcattccagccgaggggagtctaagaggagggatggctttgtttggtccacacaaaggcttcatttggaccagtagtgctccaggtccagcaccatccaatactttaaatctaagtgagtggtataaagatcaaaatcaagggagagtcatcacttcactgccatgttaggagaatagtcctggaacccatatttaagggttgtgatgctttgtgctcacagtataacatgctggctgtaaagcagtggtcatagtcacagcccgtctcaagtgttctttgtcctgagcctctgttggttaacaccaccgtctgcagccagggtgtccatgttcccacattccagcttccacaatgattctgtgaaattccaccctcctgcttatatcaaacagctagacacagctagagaagactcacaaacatgcaaaaactacctggaagcccttcttcctttaatacagaggttctcaatctgtgggtcataccgcctctgggggtcaagtgaccctttcacgggatttacatatcagtcatgctgcatatttgggtatttatattacaattcgtaacagtcggaaaactacagttgtgaagtagctttgaaaataatttcacggttgaggtcaccacaacatgaggagctgtgttaaagagtcgcagcaccaggaagggtgggacccaccgctttaatccatttgtttccttgttttggcgggaactgtatcacaccttttttgtgttcctcagtcactctggtgcctccttcaatgtctcctctcctgtgatctccgtcttcgccaacagcttcagtcctcaccgagcaaatgaagatctacacccatcccgcactctcccctcctgttgcaatgcattctggtcctattttagcaaacctgccagctgcccagtggagttcatgcccgttcccatgactgggccctgctctcataaccacgctcccacaccatcaatgctccctctctacaaagtattgctgtttctgttagcatcattggaacctacaaatgttaaatttaaaaacaagatcttccagtccacctgcagcaccctacttagaatggctgacatgaccctaacacttacagagggtggccagccacctgtagaagctgcttgtactgtattgttctcaatataatatatgcttgtttttaatgtgcatttactttccccacctaagttactatagtcatatcaatatattcactaattgacttcagtaagccttatataccattgtatgccatgggacatcagcttcgaccaaggcttcaatttgtaaggaaagaaacaaggtaatatggctgatgcccacagaactcaacagtatttaactcaccctatcacctgaaagcagcttatggaatggtaaaatgccccctctggatccttggaaccaatagtgccctctgggggtaccacatgctatggttatgtatatgatctgaaccagcaggcagcccatggagtacgtccaccaccctcaagacacaggcaatggaatgcaggcagagaggtacatccagagtgactgtgtggagtacaccccagtcatgcctgtgtggagtagcagctgagtctagcggtggcagtgatgccctgcagtggccatgcccatactctggactggttccctctactctcaagccaccttggcttctgccattttccaagtctttttcctcagtattccttgtctgttctgtgatgtgacatccctccattgctctttccaaaattctctctcagcctgagctttgcagccttgatttctattcctcaaatccagacacacaggctaccttggaaggctctacataaagaaaccactgcaacctcccagtgacagttttgtggcttgaaaatattgagcattcagcctcctgggtgtagtgttacaaatacatggccccaggaatgaatgaagtatgctttccgttctccaaaacaatcgtgtgtgtttataaccccaagcactctccattccctcatcctgtcctcatcccagctacaaagatggctcatgagtcaaagcagtatcaaagcaaagtgaaggatttgggctccttgcttctttctttaggggtggtacatagattgggtggcactgctctgggctcctaaaccatttactgcttcttggattcaaattaatactttaaaagttggggtacaaattgaagcaatgcatttcagtatgctgtaccctcaaggggtgagggggctgctgggatacagactagagcagatgcatggccatcctgtgcctagttagacctttcttcataccataatctccaccacctgaaaatgaaagacaaaatccagcacaggacccctctcaccaccttctgctatggaatatttgcaggaaaaaaagggctctggtgctcatgaacacacttagaacaaaaataaaagaaaactagccacaggcactattagcctgcctctttcctcgaaggaatgttcatgaaaacaggtcctcctggtgtatatactttagtaagtttctgagttttagttgtctggataagttatttattgatagtttatgtctcagggcccaggctggacaggtggtggctgttaatttgcataaacatgacatagagtccttcttccttaaaatgaagcaaactactgtttaatctaatggagtcccttggtgatggacccagactgaaagctgcggagtaaccagagaagcacctggtcttggcaataatagtgtcctcccagtgtctggaatttaagctctggaatgttctggacacaggaataggcctcctctagtggaagacccaggaagagggggcctcagagtgcgggctctgggttgtgaatctttggcaaatcctttgtaatcactaagaattagctgtcctcaggagaggcagtctgtcatcaggcaatgtaggcacagatgtcaaagcatctgggggtagaggcttcctgaatcatcaaagagttttaaatctaaattcatcatcactttgcttttaagacctctgaattataggatcccttgagttgcaaatctctctctctctctctctctctctctctctctctctctctctctctctctctcnnnnnnnnnnnnnnnnnnnnnnnnnnnnnnnnnnnnnnnnnnnnnnnnnnnnnnnnnnnnnnnnnnnnnnnnnnnnnnnnnnnnnnnnnnnnnnnnnnnnnnnnnnnnnnnnnnnnnnnnnnnnnnnnnnnnnnnnnnnnnnnnnnnnnnnnnnnnnnnnnnnnncacacacacacacacaagcaaatcattctggcttaaacggggaaaaaggcacagtgtgctgactcctaactatcaaggttcagggggaaggctggcttctgggggaaggaccaacttccctgggcttctctcaccacagcaagaccacagagcttccaggctcaaatctcctctttctaccactaaaattggaagaagaaaaacaaggtagtttcccctttggttcccatcactctggattacatcatcatccttgaacctcccactctggctctcagaaacacctggcagtttagctcccccgtgagagctgctgatttagtaaaccccacagagcctgagtctccaagtagcagccaagctcccaaggagccctgtcaccagcatttgcggcatctgactttgaaaatcactgctgtacattatatgtttcatgttagtggttagctgctctcacgtaaaaaataagttcccagggcgaggatgtggcttgtagcaactagcaaagactagtcaccttgtctaacacgcatgaagccccgggtttgatcccaacactgcagaacccagggggggtggtgaatgcctggaatccagcattgaggggtcttgggtagaggctggaagattagaaattcaagggttatccttggctacataatgaatatgaatatgatatagctagcctgggctctatcagacactactaaaataaatctaaacaacaacaaagttttttagatggtcattctagcttctagaactctaaccccagccctctgggatagtaaggaaacattttataaaggaaagcgtgtgagtctgcttaggagacagcaggtaagagcaatgggcaagtttacacgttcccttagtgctagatacggggtcacacagtcaggctctgaaaggtcacagcagcaagaaaaagatgtacagatactgcttccggaatgccaggaagacgccagtggcaagcagatttgcaggctcggcttacataactggcaactctgaagtcttgaggacgttgatttataattatgtcaataaaaaagaaaatgaactttgtggagatgaggagatggcccagccaggaaagcacttgcatctcatacatgaggaccagggttcaatgccccagaacccacattacaaaaattacaaagccagtgtggtgacacaggcttgtaatccccaaaccggggcggtagagacaggcaggggctttctggtgagccagtgtagcctactgaatgaggcccaggtccagtgagagaccctgtctcaaagaacaaggtgggtgaagactgacacctgaggctccgatctccacatacatgtatgcacatgtacctacctgtacatatatgagctcacacaaacatgcatagatgtgcatacaccaataacttcacaaaaaaaataaaatattcttctagtggaccatgaggcttttaggactactgtatgttccagaacttcctggctccttaaaatgtcaagtaagtccctcaaatgctgtcattgtataaggagccattgttggaaaatccatagttcattcctgtcttaagtgtccctatcggctggatttatgctgggggtggtggcagtagctgtctccccctgattgttacattgtttccagttcaaaaactacaaggaataaaaagcaacacatttttccagccctgggaagaaaaaaaggcaatatgtttgtgcacacacatagggttcctataacatccttttaatcacaatttgacctaggcctgcaatagagacagcttgactgtgggcagcaggcactgagaacccacctctgccccagggagggagcacctggacttgatttgtgaccctgaacggagccctgtgccattgagtgattatcataccattgctgagctggctgatctccccaaagctgttccctccacacacaagccagcttcgtgtgttttccaagtgggtggtgatctggaatccataaataataagcatgggagggaaaattacgaccctaaaatagaaaccagaagcgtgtgttcacaagatggagctgcccctgaagcatgtggcccttccctctgagataagacgctgctcttgggggtgtccacagcagccacgccataaatcagaacctgagaaaaccaattcggacagcttgactagacttaggaagtgactgaggccccctccacccctgtctctgttgctcagttatttttgcatcactgacatcaaaatacctgatacaatgacgtaaggaaagaaagatctgttttttctcatggtttcagatagtctcagccgaggaaggcatgccaggaaagtttagttcacagtggcagtagcaagtggcaaagactggtcaccttgtggtagaccaagaaatggaaaaaaaataaaaaagccagaaccaaccaagggctgggtgtagacatcaaggacctgctcctgctgacttactttcaccagataagaacttcctcctaaagatgctatagccaccaggcagtggtggcacttgggagacagaggcaggaggatctatgtgagttcgaggccagcctggtctacagagcgagtgccaggacagcctccaaagcaacacagagaaaccctgtctcgaggaaaaataaaaatgctatagtcttcaaggacagtgtcatccaatgaggaacaagctttccaaacaagagcctgtggagacatttcaggttaaaccagggttcctaggctacaaatcccacagcattatactggaccatattcctgaatactgtactcataatacgacaataatgacttgtatactttaacatatctaagcatagatgtattgaaaattctagacagaaggaatatttaatctttatcatactcttatggaattccccatcactcaagccgtccatcgctgacaaagtatcattatgtcatgcatacttttgtttaaaatcaactcagacatctgggtccattttcagatctgcctccctgtttgtttgtttgtttcgtctttgtgcacgtatctcactctcatctaccataatcacagtagggcagtatgtggctctcatagggtgttgtgacagtgagcacactacatggtagaatgtttccattcattagctctatgagaagacaaaagaaataaacgagaagaaacacaacccaaaagatctatcatgtaggattgtgtttgctctgggaagtgttccagttgaattgaaactgtgatgaaaacaagactcctccaaacacatttcttatccctctcccttttttcctccctccagggtgtgtatgtatgactgtgtatggaggccacaggttgatgccatgtgtcttccttgatcgctcctcaccttatcttttcagacgggtctcacactgaaccaggagagcactgattgactagattggtctcacactgaactgagagatcactgattggctaggctggtctcacgctgaactgggagatcactgattggctaggctggtctcacactgaactgggagatcactgattggctaggctggtctcacactgaactgggagatcactgattggctaggctggtctcacgctgaactgggagatcactgattggctaggctggtctcatactgaactgggaaacctctgattgcctagcttgggctcacactaaacctggagaccacagattggctacactggtctcacactgaactgggaaatcactgattggctaggctggacagttaaccccagggatcctccggcactaaaaagggctagaagtgctagggcaaaaaggagagcgctgaactccaaaggcaatgcatgcgatgtgagactcctcaagacttttccctgcatgcattctcagctcagcacactcaaaccctagagctcactcctgtccaatccagacaaactcacaatctagatgcagccacatgacagaaccatccctcagggatgaaggaattaaacaagtctcttgggcatttcctttgttatctcttttccagcccaagagttcctcccaaaactatcatttggagactcattcactgtccaaccacccaaccccatctcagctagtcctgtccctgggaaagcaggagcttttacaatggagcctgacttctactcattttgcctccaggtcaataagctgcttttctcttggcagtggcccacacggctgccttgggcagagcccaccgtctcgtctctaggcacgcctgaatcccagcatgctcttgactcctcctcccctgaacctacacctcctccatcacaacaaactctcatagccctctgactcctcttccctacgagtcccacagcctaccctttgacactccagaaataacattccactcacagttgaaaagacgggatcttttttgaatgatgtacattaataggacctcaatgtatctccccagacccgtgccaagcccaggtcttctggtacctttcatcacctgtccactccaggacagtaatttgtccaccgaagtaatttggtgggatatggctatgataggacaaaggactttcagtggactttgaaatcctcctcagcaatcctgtggcccagggaggacccttcatcatcattaactttgccccctggctgatctatgctaccctcccccatgtcggtcacacctacaagaatgagaacctagttgtatctcagcctagtggttttaccatttccatgcatctggtttctacaggggccaggagggagggagggtcaatgagttcatcggctcttggttgaaggagttttgttttatccacaacttttcagagagttgttgggaaagttaaactcatttctactccaacattctgcctcttctcgctgctttctctggatgcaacatggtgtctatgaaaatacaactgaatgatgaagaggaagccaagagttccttccgctacccccccatcaccaaagggacttccactaccccccagatcgccaaagggacttccgctaccccccccagatcaccaaagggacttccactaccccccccccagatcaccaaagggacttccactacccccccagatcaccaaagggacttccactacccccccagatcgccaaagggacttccgctacccccccccgatcgccaaagggacttccgctatccccccagatcaccaaaggacttccactacccccccagatcgccaaagggacttccactaccccccatcaccaaagggacttccgctatcccccccccatcaccaaagggacttccgctatcccccagatcaccaaagggacttccactaccccctcatcaccaaaggacttccactacccccatcaccaaaggtatttctgctacccccccccagatcaccaaagggacttccgctacccccaagatcaccaaatggacttccgctaccccccaagatcaccaaagggacttccgctatccccccagatcaccaaagggacttctgctacccccccccgagatcaccaaagggacttccactaccccccttcccagatcaccaaagggacttccgctatcccccaagatcaccaaagggacttctgctaccatccaagatcaccaaagggacttccactaactcccccccccgaaatcgccaaagggacttccgctaccccccccaccgagatcaccaaagggacttaccgaagaagggggcgtccttccgacattccataactacctcaaattatgtcattttctccttatctctgctacagcaatctgtgggaatgctttttgcctggctctccttcccttgacctgctttgtcccttagcttcatgcctccctggattttccaattatgtctttccctccataatctttattactgaaattagaagtctctatgcacagaactcgtccctcggacacacagatattcacacagggcacagagttcagacatgtgcaggcatgcaaaccaatgcacacactgcagaagatttactgccctgaaatattgccacttttacagatttattctttgaaaagtgagatttttctcttctgggacagacctggaaggtgttggtggggaaaaagaaaggcctgtgtatttcatatttcaccagcccacccaggctccagccaccctacaaaggaagaacgggataatggaaggggggataaatgtaaatcaccaagattgaggactagaaatgctagtccatctaaggctttagagccagtacaaagatccggatcgttcgggagacttataacaacaatgtctggtcctccctctagtgggaggaccaatcctcaggtggattggccccttagtaggcaagctccctcccatttgcagagcgtgcagggtgatgactctcaaggtggggaccaagacagcttgtgcattgtgcatactgtctgcccacagatgggattctgcactggaatctcctgggtcagcctacatagcttttggagctaccagaaattccactaagttttcatttcagagtcctcctgaaacagattttaattcctttcatttgggcgatacacacaatccctggaaggatgggggctggctgagaaatgtggggtatattgttagacaactccagccacctaagcaaggaaatgctgaggaagggaggcccagataccactgtagacttcgctgagagagtccagtggtgttttagcatgccctgaagagctctagagctctgcttgtaactgcagtctctgcttgacaaaaagcaaatccaggttaggattgcatcacaggtatgtctagtgggcagccgagagaacaacatagttcttcctggaccctgctggaccagcatcactttgtaagaaggatggtgacaaattgaagtttctctagagaattgtagtcactagagggatgacctctaagcaaggctctcgtttccttgagtaactcagaagagaccagcaattttatattctaccccatacacagacatgagcatgaaagcattcgcgtgcgcacacacacatacacacacacacacacacacacacacacacacacgggggagggagagggagacagagagacttacatctcctcattcatattgagatagtctatagagagacccatcaccacataaagaattgtttgaatcactactgtctttgttatatttagcattgtaagaattataactggttatttgagttgtgtgtatctctttaaaggtttcttaagagagaggattttgttctgtttctgtgctttgaatatgaaagccccctttggctcacgtgtttaaacatttggtccccagctgatggaagaagcacatcactggggaagacttcaaggtttttcatccctgcctcacttcctgttccctttattttcctgtgtgtaatgaaatatgttcatcagccacacccctgccacacccctgctgccccacctcccctgccattcccacccacacccctgctgcccgcctcccctgccacaatggagtgcaacccctctgcaactctaagccaaaataaacccttttctcatctaacttgctttcatcaggatatcttatcacaccatcagaaaggtaactaatacactaacacacttttacggtgcagtgtccaatgcatgcatcaaatcccagcccacagagagaatccagtgagtcctggatgacgagtgactgactgactgactgactgactggctgactggctgactgggtgagtagcatgagtgatgcatgagtgaactagtccagtctctagatccttggagtataatcattttactggtacagatgggacaggagagtaaggagcaccccacataatatgtgttcagactggaagagggaagacaatgaggcatgttgtcatttattccttaggacctatgaggtcatactattatgacatctattttccaaatgctcaaattgattcaataaattgggggggacctctcttaagttctcacaggcagaatctgaagcactggtcctaacgctgagttaggagttagtgagttattctcactgccttgagttatagaggtctgatcacaaggacatgcctgtggcatcacccttcatctcaacatgtccactgagctggtgtgctagggtacgggctcttcaagagcagggacgaaggtggctctctttctcttgagaaggccactggacatgtataactgctttctctcccccctccctcccagattttccttaataaaatccaaataactgctttataccaatttgttctaaaattcttggcataagccaagaccctggttgcacctgagcggggctctgagaagctccttgggctgcgcatctggtaccttggctgcatctcctgctgctgctgcatcccctgctgttaaccctgagagtccattagcaccaagctcttatacaaacagctgtcttccctgcctccctcctgcagatccttgcttggtgtgtaaaacgttttaactaactttttcactttacagacctggaagccatagttttctattcagagggagggaataaggcacaaggattgttgagattgagcccaaggctttgcagatggtaagcatacactctgttaccacacagctatagctgtggcttgatacactgttaccacacagttatagctgcaacttgatacactctgtttgttaccacatagctatagctgaagcttgatacactgttaccacacagttatagctgcagcttgataatactgttaacacagagcgatagctacagcttgatacagttactacacagttatagctgcagcttgatacactctgttatcacacagctatagctgcagctggaggcggctgtgattaaagaaaggaaggaaagcagagttgtgtggaatggatggcagcactctagagtgtggctgaaggcttggagtgtgactcaatggtagagcacttcatgggcaaggccctgaattcaacccaaagcacaacaaaataatagaaaagggggagcaggtcaaaacataactgtacgctgtggaagaaaagcatatctttacaacaaatgatgctggctaagagactagattcctttctctctccgtgctcaaaaaatcagctcaacatggattaaagtcttaagtattgaacttaaaactaggaaattgctccaagtaaacacaaaagaaaacacacaggacccttgaagttcaggcaaccaaagaaaatttggaagttttggcacagcctgggaaagagtcaacaggattaagggacaacctaccaagtatgagacaatatttaccaatagtagatctgacaaggaatcaacttgaggtaaatataagaaactggaaaagctggaccctgagaagcaaagaatccagctttgaaataggctaaagaacaaaacagaagccaaacgtgatgtctgcctgtgatcccatcactcagaagacaaaggcaagaggatgacaagttcaagaccattttgaactatgcagcaagttccagacctacctgagtcacaaagtgggattagttccagtcctttggtgggaaggtctcagcagaaggggcacaaaacagagcatggactatagatcacacagtatgcttgcctgaaaaggctcaaggtcttgagttagatccatagcaccaaaggaaaaacaaatcatacaaaaacttttcaaaacacaaacagccaaccaataaatgaaaccacactccgtttcactagtcattggaaaactgaaaaaaaaatcaatgagatattatcccatcccaattcaaatggctatcactcaaaaggaggaggagaaagaggaggaggaaaaagacaggtgtcaagtggggattaatggcaaatactggcaagaatatggagaaatggagcccatatacaagtaatgagactgtgagttaatgcaagcactgtggaaaacgctgtgaaattttctcaaaaacaaaatacaaacaagtataaataaataataagtaaactagagctagaattaccatccaatccaggaagtctactcctgcgtatatagaaaaaggaaatgagatctttctaccaaacagataagcatcatttgtaatggacaaaatgcactagcaacctacatgcctttcactgagtaaatggatgcagcaggtctttcttttttttttttttttttttcttttttttttgtttttttttttttttttgttttgtttttcaaggcagggtttctctgtgtagctttgaacagcaagtcttgattagcatgcccagccattaaaaggatgaaattctgcagcatcgatagggctggaggctgcctgtggagtgaaagaagccagacacagaagaacacataccacatgttctcgctcaagtatgaaaaccagtgtgtcaacctagaagaatggcacagaactgcagtcactggggatgacgaatgtggaggggagagagaagtaaattaagagggatttctggggatgggaaggatttttctaaagggagggggaggatgggaggggtagacagacacaaccagtgcatgatgtacagagcatcacaggggtcctctaatttctgcagttgagaggcactgatgatgataacatcagaaggggcagctgtcaatgctgcctgtcgattccagtgccaggaccaatgccagcatcttccttgttgagagctaagtgagctggctacataaaccagccatatcctctgccttggagtgtttacagtaaagtggtaatgttcccagtaatgtggaacacaccagaaaggctcgtcataagaagaatgttctgagccttgctcagtgtgcttgtgtacactcttaatctcagctacccgggaggcaatgacaggaggagcacgagttcaaagccaaccagagctaaatggtgagctcaaagccagcctgaacaactaaaagagctgttctctcctgtctcaaaaatgaagagggctgaagatagccctctgttcaatcatcagcacggggcggggggagaaattttgattatttggtatgtaaaagatgatcctattaacacttttgaattgattttaaggcttccagcaaaaatgaggtcagtatgactactatccttactatacaaatgagtggacagaggttcaaagaagttatgtaacttaaaaggataacaaaactggtcagtggtagagccagacagactcacgcaagagcctgtcttccacccagtacacactacatactaactccagagcctgcccaccacccagtgcacactgcgtaagcatcaaatgtcagataacacgagtgccacagaagatgtgtgtatctgaatccctaatggtgtcacactgtgttaactgcaggaggaacagaatggcctattttgaagtacagcatcatcaaggacaggcttcacatgtccacagtgagagcatccatatgccctggccagcccttccccttctgctgagaacttccctccaaaaggactggaactcagtacacgcatcttctcaaccccacctctaaagaggccatgtctttccaaagccacaacgcctatgaagactaagaagcatgccacataatgacatgttagtcatcaatagtgatctcagtaagattatactacctggtgacaccgtcaccttcttagtgtatgtctgatactttatgtatcacataaagttatgttaaactgcctaacaatgcatttcccagaatatatccccactgttaagttaggcacaactgttgatgctctgatggagcttggcaggagacatcttcaccccaaggaaaaagtgacatcattcaaggcagaatgaatggtccttgagactcctctcccataaaggaaggatacaggctgaattcctaagtcaggatttgactgcagactgcagtcaactgatcctaagaggcatgaaggagaaagagcctccagagggtcttgataagctgtttttctgtaaatatgaagaaatgtctgtcaatagtgcacacctaaacctgtaggaatatgtaggagccttcaaaagaaaggggcaccaagaaactgtccacactggcctctgccaccagcaaaatggtcccaaagtaactccacagggatataaagccagcaatgtacattacagcttccaggagaggagaggcaagaaggacatagtaggttgacctttgttacacaattccacccttccctcagcaatcacattggttgagaagtgtggcacattcacttttaaacagtgatcacctggccagggcgaccatttgcctgtcagctagaggactgagatgaacgggaaggcctttcatgcattttcaggagagaccggaattacctggctgtgctttgtagaactcaggtagtacaggaggatgtctgctgatactcccagtgaagcaactgtaattatgactgcaggagagtagtcacaggtgctgtggaacaaacaacagaggagccttgctgcatacaaagtacacaagctgtgtgaccagcatgcaccgccacctctctggaaatggtgcagtatgctaagatagctatgctctgcaacgtctttgcttgcatcacctccaaaatcaaatataagtcaaacatcaagtgtgggaggaggaaggccttaagaggcttggcgagtgagtgctgagactgttagtgttcaccatcaagttaaatggatttagaataaccatggaaatgcagctcagagtcgttctgtgagcatgtttccagaaaggtttaactgaggaggaaagatccaccctaatatgtggaaccccagactgtatgatgggctcttttaccttcaaactgtgagcagaaaacagactcccccttttgtaagttgcttctattggctattttgtctcaacaacaaccaaagtaactcatgcaaatggccacactcagtctgctttgaataagcataaggggaaagcatatgataaaaatgatgtgtaatcgaaggttaatgttggggcgggggcttcaatgtgctgtgttagttttgaaatcagttttagtaatattgatgagttaacaagaacaaggtgtctggcctgggatcttataccttcttctggtccccatgggcattgcactaacatgagcaaacacactcacacatgcatacacacattttttttttaatctcacataccaacattggtgaaaagagctagtttaagctgccttctctggaagcatggcttctgggtggctttctcactgatgaactgtgtaggagccagagctctatgtctgtccagtgaaatgagcactgtcaccttccacaggttcaccagatcaccagactgactcagtgaatgcctgtcttcttactcctaaccctttcgctgtgttctcagtctgtgtggccaggaggacagcctttgtgtgtgttcctccacctcacacagaaggggctcacgtggaggagataactttgcacataaccctccattcttctgctcatctctcctatacccacactgtggaatttcagagccaacacacacagagaactcctgacaatgttgtaactacaaacacatgaggttgtggtttaaaaaaaaaatagtaaagatcaggatagttcactatggtgcctggctaactttttgtaaactttttttccataaatgtcacagacttcagctggacagggtggccatgcctatattcctaacatttgagaagcttaggtaagaggattttaattcctaaaccaacatgggatacatattaatacattgtttcaaaaaataaacaaaattctcatcccctgcaaatggaaccacagttttacacacacaaacacacacacacacacatacacacacacacacacacacacacacacacacacacacacaacctccccacaagggcttccactcccctgcttctgtgtttcctataggctctatctataggatgactgttgtaatgtctacattccaacctagagagtaaataagaccatctgaggcatcagccatccctagtaattactgtatctcaagaccacatactaacagttcacattcatataattcttccagtgtgaacacggtggattctgctagcaataacaggtagatttgtgtctcttttgagctatacttaatcccagtgccctatctggacactatgtaccatatctggacacaaactaatagtgtgaactgaagaaaggcacctcagcctttccactaaagcttgtaaaaatgagatggagttgggaatttatcttccactaaggtctctcccaaccctaaaatgctttacctgtgaaggtattctgtggagttttctactccagccttcatggcccttacagggagcactttctgaactatttcttttcttgaactgtttgagtctcagtttacctttttgtatgtttgtcattcccaaactggctatgatggaagcacatttatttaaatctgagcaaaagtaactgcagacggttggaccaacccttcggtggaggcagtagaatgagcacaaaacccttaagacttcaaagtttccaatccccaacctcaatcctgccccggcatcctagcctctctttctgggctctaggtttctcccagaagccttcttgtgaggtggcatgccttgctcttaggctctggaatgacattgactttgatccactgattccctggtccaccctgaccctccccatgccctgaaactgaagtcacagatggccatgagacaccatgtgtgtgttgggaactaaacctgggtcctctgtaagaataacaacttatcttaactgctgagccatctctccagcccctatgacatgcttcttaagcagaattgcctagagacagcaagacagcaattccaagtcacaggatgatccccacatgttctccagagtcaggcttactcatgacaagtcattttaagtgtacagcctcaccatgtggagaatgtttacaaactgctttttaaacattgccctctgtagctgtcagggttctctagaggaacagaatgggtaaaatgcatatattaaaatagaatttgattgacttagacaatagggttggagtagtccaatgatggctgtctcacaccagagagacagagaactcaggagctgctcagtccactgggctaactgccttgtcacttccaatctggctccaaaggcttagaaggtgcctgggagactgctcatcttcagtccacagtgaaagccagaagcagctcattcccatatcagtgaagggttcagcagtgccagcaacagagtagatgaactcaacagcgagagtgaaagagcaaagctttcctactctgtgtccttttctctgggcagcttccagaaggtgccacccacacataaggtgggtcctccccatcaatccaggcaaccaagatgagcccatgcaggccaaccgatgttgacaatccactgagatcctctccccaggtgatgataggttgtgacaagttgacaaagccaagcatcatacccaccaaacttttaggaataaaatcataggtaaatagagggcatacagcccaaaataccccacacctttcacacagttgccaaaatagcccaggcatggcacatggttttcaagtctcatggctcaacttagaccttcactggaacttgacattctgtttctggctttaccagcactcacattgggatcctgagatactctgaattatcctgtgacttggaggagtgctttcttgaatgtcaccaggaaattctcctcaagaagtacattgtttagctggacagatggcttggtggttaagaacacttgctgttcttacagaggacccaggttcagttcccagcacccacatagtagccataaccacctgcaactcaagttccagggcacctgatgtcctcttgtgaactccccaggcaccaagcacacatgcagtatacatacattgcaggcaaaacacacacatacacacacacacaaacacacacacacacacacacacacacacacacacacacacacagagagagagaaataaatcaagttttttttttaatttgaaagaagcgtgtcatgagtctatttaaaactatcacaggggctggaaagatgactcagtggctaaatgagttcctctggctgctgttccagaggacctggattcaattcccagaactcacaagatggctcacaaccatctgtaagtccagccccaagggatatgatgccctcttctggacccctctaacacaacatacatgagtgtatacatgggaataaaggtaggcaaagcaccgatacatataaagtaagacaaaaataaatttaaaattataacagctcttttatgtacaagggacatctgttgagaagagggttccaggagacaggaaaattggagacaaaaacaactaaaattcattatgtaaatagacgaacctgtcaaatagtttttaaaaagatgaaagtaaaaagctgcatgcgacaacaaactgaccctgagggcaggaaactctggttagctgattttgcagttgagaagaagataaataagaaagctggggctgcacccactccaaaaggactttgtcccccttctcctctcctctgtcccagccctcacatgtatcttcctgccccgggattccttccattgtcatgtcacacctgttatccttcccagccccatcgtccatcagagcctctttccagtctttccctttctagtcttgtcatggactggaagtctaaaagagggagataccaggctcccagtgtccctcttgaggacattctcccgaacacctgatgatctgccacttggctccactcctcaaaggttccccacctccaaacagcaccaaattgggacccaaacctttaacacacaggcattggaggaacattttagattctgattgtaacattacctccataccttaagtggactgaaatctcactgctaacgtctctttgtatctctgtcaaaacactacccatcatttttattaatacacaggtatacagcattcattcatcaaatctaagctccctttgtccaccctttccccagttaccaacctccactaatgactcatctgtattcaacttattttgtagttctgacaaataggaaacagcaagcagtgcttgtctgtatctaatgtagttcattttatatttccatatgtttgctggagatggcagcatctcacttcattgtgtcacatatcatgttttctcaatccattcttgtgttgataggcacctagtctggttctgtaacttagctatggagaatattgtcatgccccatatattagtcacagttctctagaggaacaaaatttatagaatgaagtgtgtgtgtgtgtgtgtgtgtgtgtgtgtgtgtgtgtgtgtgtgtgtgtgttggggggatggaatttattagaatggcttccagtctgtggaccacatgtcaacagaaagaaagtcaacgtcccaggcgaagacttgaacttgactactggatgggaaagaagtgagaacccacagttcatgtcccttcttccctctggaggagagctacccactccacatgggctctctggaaaaccttctataggacagtcacccactccacacgggctctctggaaaaccttctataggacagtcacccactccacacgggctctctggaaaaccttctgtaggacagtcacccactcccctcaggctctctggaaaaccttctgtaggacagtcacccactcccctcaggctctctggaaaaccttctgtaggacagtcacccactcccctcaggctctctggaaaaccttctgtaggacagtcacccactcccctcaggctctccggaaaaccttctgtaggacagtcacccactcccctcaggctctccggaaaaccttctgtaggacagtcacccactcccctcaggctctctggaaaaccttctgtaggacagtcacccactcccctcaggctctctggaaaaccttctgtaggacagtcacccactcccctcaggctctctggaaaaccttctgtaggacagtcacccactcccctcaggctctccggaaaaccttctgtaggacagtcacccactcccctcaggctctccggaaaaccttctgtaggacagtcacccactcccctcaggctctctggaaaaccttctgtaggacagtcacccactcccctcaggctctccggaaaaccttctgtaggacagtcacccactcccctcaggctctctggaaaaccttctgtaggacagtcacccactcccctcaggctctccggaaaaccttctgtaggacagtcacccactcccctcaggctctccggaaaaccttctgtaggacagtcacccactcccctcaggctctctggaaaaccttctgtaggacagtcacccactcccctcaggctctctggaaaaccttctgtaggacagtcacccactcccctcaggctctctggaaaaccttctgtaggacagtcacccactcccctcaggctctctggaaaaccttctgtaggacagtcacccactcccctcaggctctccggaaaaccttctgtaggacagtcacccactccacacgggctctctggaaaaccttctgtaggacagtcacccactcccctcaggctctctggaaaaccttctgtaggacagtcacccactcccctcaggctctctggaaaaccttctgtaggacagtcacccactcccctcaggctctctggaaaaccttctgtaggacagtcacccactcccctcaggctctctggaaaaccttctgtaggacagtcacccactcccctcaggctctctggaaaaccttctgtaggacagtcacccactcccctcaggctctctggaaaaccttctgtagggcagtcacccactcccctcaggctctctggaaaaccttctgtaggacagtcacccactcccctcaggctctctggaaaaccttctgtaggacagtcacccactcccctcaggctctccggagcagccctctggttttctggaaactgacatgagcttgccttgcattcctcccatttcccacctcacttcccaccccacccccagtgcttcccgagattgtgcccacaggaaggtgttcatatgtacagctttacctcaggctctgtttccatggcctacagccaacacactaaataaacataactttgtcttcctttgacctcatcagtacctccaagtactttgttctgtcttgtgtgaaggctgttaccgatggctgcacccacaccaactgctgtctgtgcactagtcagcactcagtaatactttcatttaatggaactgataaataaataaattacaaaacaaagaattctaatgatcaaaatgtatttgacccatcaggttccatgatatatactaccaccaaagctcgactccttttccttttccctgtaaatattagtacaaaatagattttcttttgctctaccatatcacactacaaatagaaatacaaacactcacaactcctgagggaatacaaaaggcagaactaaaaaggagatggctaatggagcatccggggatgcactctgtgtttccacagcccaagaaaaacagaagagttaccacctgctgctccaaatcatagcaacctcgtccttcagccctctgtgaacagtttacttccaggcctttctaaacacgtcacattgtcataaatcacggtgacattactgaatctgcttagactcacaatccatcaccacagtgataacagaagggagcatactgcaaaagccaatgcattattgatgcactctgtaatgaatgcccattcggtaattatgctccctcccactgaaaacgcaggcacatgtgtgtgacatgaatgaaaatggctcttaacggcagaaaatggtctgagcatcttctgacctgaatgttcgggactctgatgctgggaatcttgacctgatgttattagaggcactcgtaccgtgacattgtgtggtttcctgcttattcttgctctcccccatgatccacttcccaggcctccaccaccaactcatggcccaccctggacagagaatattcctcttacagacagaggcgtaaagtgtgatagggtcagtaatgagtaagtcagactcctagatagaattacagtggggaagactcccatggtggttaatctcacttgtcaacttgatgagaccggcctcggagcatctgtgtgaaactatcttattagattgattgaggcgaataccgcccacagtggttggcaatcccagaccttataactataaaaaggagaaaggcagctgagcataagcatccattctcctctgcttcctgactacagcagtgtcctttgcctgtcaccatgactcagtcctctgcctgccaccatgtcttcccgccatcaggcactgtatccctctcaactgtgagctaagataaacactctgtcccttaagatgataaacaccttcagcaaagtggcaggatacaagattaacacacaaaaaaaatatcagtagtgctactatatacagacaataagtgggctgagaaagaactcagagaaatatcagcctttacaataaacacaaacagcataaaatatcttgaggtaacactaaccaaacaagtgaaagacccatatagcaagaacactgaatctttaaagaaagaaattgaagaagataccagaaaatggaaggatctcccatgctcttgaataggtagaatcaacatagtaaaaatggcaatcttgccaaaagcaatctacagattcaatacaatccccatcaaaatatcagcaaaattcttcacggaccttgaaagaacaattctcaactttatatggaaaaacaaaagacccaggatagccaaaacaaccctgtacaatagtggagcttccagaggcatcaccagccctgacttcaagctctattacagagctatagtcctgaaaacagcttggtattggcacataaacagacaggtagaccaatgaaattgaattggaaaccctgatattaacccacacacctatgaacatctgatttttcacaaagaagctaaaattatacaatggaaaaaataaagcatcttcaacaattggtgcttctgtaaaggatgcagatagacccatatctatcatcatgcacaaaacttaagtccaaatgaatcaaagacctcaacataaatccagtcacattgaacctcttagaagagaaagtgggaggtacccttgaattaattggtacaggagactgcttcctgaacataacaccagtagcacagacactaagatcaacaattaataaatgggacctcctgaaactgagaagcttctgtaaggcaaaggacacagtcaacaagacaaaacaacagcccacagattgggaaaagatattcaccaagaccacatctgacagagggatgatctccaaaatttacaaagaactcaagaagctagcctccaaaacaccaaatcacctagtcaaaaagtggggtacagaactaagtagagaattctcaatagagaagtctaaaatggctgaaagacacataagaaagtgttcaacatccttagccatcaggaaaatgcaaatcaaaacagctctgagatacaatcttactcctgtcagaataactaaaatcaaaaacacccacgacagtttatggtggagaaaggggaacactcctccactgctggtgggagtgccaactttggaaatcagcatggcaattccttgggaaaatgggaatcagtctaccacaaaatccatcaattccactcttaggcatatacccaaaagatgcacattcatacaacaaggacatctgttcaactatgttcatagcagcattatttgtaatagccagaacctggaagcaacctagatgcccctcaactgaagaatggatagagaaaatgtggtaatttacacaatggagtactactcagcagaaaaaaaaaaaaccaatggaatcttgaaattcacaggcaaatggatagaactagaagaaaccatcctgagtgaggtaactcagtcacaaaaagacaaacatggtatgtgctcactcaaatggattttagacatagagaaaggattatcagcctacaatccagacctccagagaagctaggaaacaaggaagaccctaagagactcatacatggtcccccggagaacggaaaagggacaagatctcctgagcaaattggaagtatggcaggaggggagagggagttaggagaaagagaaggggggaagaggaggggtgaggaggacaagagggagcaggaaggttgagtcaggagaagaatagaggaaagcaagataagagatgccataatagagggagccattataggtttaaagacaaatctggcactagggaaatgtcaagagatctacaaggatgacatcaactaacaatctaagcaacagaggagaggctaccttaaatgccctcccctgataatgagattgatgactgacttatatgccatcctagagccttcatccagcagctgttggaagcaaaagcagacatccacagctaaacaatgagctgaactctggaatccagttgcagagagggaggagtgatgagcaaaggggtcaagaccaggctggtgaaacccacagaaacagttgacctgaacaagggggagctcatagaccccagactgatagctgggaaaccagcataggactgatccagacctcctgaatgtgggtgtcagttaagaggtctgggcaatccctggggcctctggtagtggatcagtatttatccctaggatagaaatggactttgggagcccactccacatagagggatgctctctcagcctagacacatagaggagggtctaggctctgctccaaaggatatgacagactttgaagactcccccccacggaaggcctcaccctccctgaggggcagaaaggggatgagatagggggctaatggggggcatggaaggaagggagggagagggaactgggattgacatgtaaaacaggattgtttataatttaaataaaaatatgaagaaaagaagatgcttttgctagggcattttatcacagcaacaagaaaataactaatacaactccacaggtgctgcccacatctctgcagaagaaccactactggatggcagccctcaggacaagtaagtgtttatctagctgagaacagcccacccaccccagagacccacccaaccgtgaccaaatgattcttaataaaacggcactacactgaaagatgagggcaaacccagtgtttgaatgccatgaaccaaaggacatggtagactcacaaatatggaatggtatggtatggtatggtatggtatggtatggtatggtatggtatggtatgctgtgaaagcattaacaactgtgttcttggagtgctggctgcactaagaagcatcttgggccatattttttagttcagtgtgtaagtttggaccccaatcaaggagcttttattaccatcaagggtaaaattttaaaaatggaggatgtatttcccactcttatataacaaaaaagaatctaggaagaaaacagccttgcagtcatccagaacatagaccatttaatctggaataagacccaagaccaaaccatccatacatgacagaaatagaggaaagcctacatattccaaacctggcagcttaaagcctctgccttcacccctcttcctggtatgtaaaattggtagcccattaatagtgtggaccactcacaagaaaaatgcatgtcaagatgttccgcaaagttctaaagtgcatatggtggcctcctcctgtgtcctcatagcgagagtcacctttcagcctcttgtccataacccacctcactgtgccacttgtagtctgcaatctggatcatcctgaagataaatgatttagacagatcatccccattttacagatgtggagcacaaagttattggcctatggctctcaagggattgaatgttcaaggatcgaaggcctcacaccaggacagctcaacccctctcactgaaattcagagcagcagcagcagatacccagcacgaccatggttccaagacacttcatgtggtcattgaccagccaagctcttggtaggtccttggcattttgcctatgtacactcaatgcatgacagcacggcagcataggggtagactcagatttccaagtgctggcctctggtccaaaccatgacacttcctgactactacccataaatgccagtcaacctctctgggccataatttacttaccagaaaagtgagggtaaatgatgtctgacttgtccatctgtctctgaggttgtcaagagaaccaaacacgatcactcgtgtaacaatgagctctgaaggatgacataaagattgcttctatggcatgatgagggtgatgggtccagtgaccagtcagtgctccttcacagacgatctcaatgccatgttcatttcaatgagatgaatgggatgattacagctctgtgaaatatgtgtacatctcccagaatttccatttctgtaaacgagattgcagtggtaaccctagagtgcactgatcatgggaaaggactgagttccagaatttcttctgctccaagactcagtaaatgacaaccaggtgtggtgctacctgtctgtcatcctagtactcaggaggctgaggtaggaggaattcaaggccagtctgggatacacaaggagctcgatgcttgagatacctcatgagacccagtctcaacaacagcaacaacaaatacatatgcatatataatgttatcatatatatacatgatatatgtgtatcatggtatatatgtgtgtgtgtgtgtgtgtgtgtgtgtgtgtgtgtgtgtgtgtgttatagtcatatatatgataacaaacgtgatgccccatcctgcttggtaaagatttgtgtctgtgtgatcagcttaataagttctattacatgtttgtgtacctccctcaatcaagctaaagtttcggctaaacggtgtcatcattagaactgctatctttggagccaggtgtgatggaacatgcctataatcccagaaactaggtggctgaggtaaggaggatgtgttttcaaggacatcttggactatacaatgaaaacaccccacctgtttcctaagtccagcctccaggcttgattccttacaacttcaaatgtaatctattcaaccacaggtacgatgttattcctggagctcctaacgaagatcagtgcccatgggcttgtctgtggctggcttaggagacagccataaatgttgagagttttctaactcttttttataatattcttattcactctttaaatttttcatacatattagaatgcattctgctcaaatccatccactgtcacccacctctgactccctctagagccctgccccacctcccacgtcacagttccatgctctatttgttgattattagttattagtgacaccttgagcacaactgctgctgcacatgtatagtgggaaattaccaatacagagtcaggtagaaatacaagggtatttaatagggaaaagccttacttacagagcgacctagccagccggcgtggcagcagtctgtccagcaagtaccaaagtgaagccaaaagagaaaacacaatcactctatgtcaccctgaccatgccctcgcaagcatggtcaggcatatctgtagccagcccctaagtaggcatggctacagcttcccctacacacatgggtgtgcaactctccgctggggtatggcaacgtactacctgacatactcccaaaggagagtggctctccctccctcagcagccgtcaactactgatagtccctccactatgggcggggccctccgagcccttcttctgcccgtgatagagttttgaccggcgatattaacactagcaattaatgtgactctaatataatagagatgccaggaagcccccgtcattcagagtcttggagcccaagatgcagctgaggggcagagaatgtcacagtgaccaaatgcacatatgtttcctccagggacagcagggccaagctgtaaacagatatcaaaacagggctgtcagtcctgaggttctgactaaagtagtggggaaagaaggaatgtcactctaacagcatgacgctctgtgtccataccaataggatcatctcctgagctggtggcatcagtggccagcatgggccaggttcccatcaatgggccagcgtgaaacaaatgctttgccggttgtgtggctctggaaatctgcttatgtaaatatctttaaacactgtgtctaaagccagcagctctgctcttcaacagggaatgaaagggtgcagtgtgggactagcggtttcctacccaggcttcctacctgccgtgcctgtcagcaagccttcttcatgatcctgagtgctcatggactcatcctcagggcgtccaaagaaaataaagtcacgttttcctcccgtgatgttcctagaatttcctggattgactaaaattcacaaaccagaaaacaaaaccaagcaaacgtcttttccagaaggggtctgtgcttcccaggactaagaacacttactcttgtcacctccatttggtcactgtgttatcccaaagatactttctcctgaagtttgcctgtccttctgaggcagggtctcatagcccagaatgcccttgaactcggcatccttctgcctctgcctcctacatgcctgagattacagccatgctccgccacgtctggtttgtgaggtactgaggacttcatctatgggctttgtccatagtgagcaggcactctatcggttgaactccgcccccagccctcccctgataaagcctaatggctgatttgtctgtgtttatttgtcatcagactaggagttctatatttttaagtgcatttatcagaagctatgaaacagtcaagtctaaacatcacgtaactcctgcaccaaagaggaagatgaagctccctggtatctcctcagaatagatgcacaatcaagctgaaggtcctgctggagacatggggtagctctcagcaggcgggcacagagtgcagccctcaattcttgcaccacagcagctcttacaagacattcttcttcccacccatccacgtcctcatgccagtcactccattgtcaccccctctctgagccctttctcagatacagaaatggggacacccccaagctcaactcttccatctgaaaagtgggtcccagcagcacttgcaaaatggctgtgagggttgaattatttctctgggtcagtctgagaaaagtcctacaagaccagaaaggaagccactcctggtattttgtcacctccccaggactgaggaccaccccccatcaacacgaatgtgcacacacaagctcacagacatctcccaccctgtctgccacactgcagagctctcgtttgcatttttaattatttgaaggcaatcatttattaagagagcagcataagcgtgtctgcacagccttttcaagtactacttctatcgcgcagagtcattgaccagagagctagctcatcatagccgctaagcaaccatggatggcttattgtcagataatgtacaaaagatgccccccaaccctcacctttgacctacagttttgtgttttcttctcctgaagcagaaacagaggctccaaacagcctgaatgcaaattcaaggtcatgctgatcacccacagggtgacagagccagcattttggcccagcgccatcttggtccaaagcctgggttctttgctctgcaccacatccagccccagccatactgaggatacggtgaagggctacagctccaacttcagcgtgtcagctcgctaaatctcctcagaaataactcatagcctggggcccttggtggaaatagagttggctccttttatgacattttccccctggcagacatttcggctttgctatcagagtgcctttctctcttcttaatccacattttgcccacgggcatcacacacattaacaccacctccactggtaccgagacaggagtccaaatgctcagttttgttgttcaccacccaccaattcatctcctctgctcggccacccatgctggttagttagctagttagttagttagtccgttggttggttggttggttagatagttgttagttccatacttgaccctgaatacagagagaagttaaatctcatggcatgtgaagaaagcatagcatctctgaaaactattgcctctcctaccagacacaagtctcaaagtctgttgctcccctgaagacgggaattgagttgatatttaaaagcttttaattaaaatagcagagtgggacttgctgtaagaggtcagaattagcaagctgaaggctttatcttcttattagctgtcactctataaacctgaggacttcataaaacatggctctccttccctttatgtagaacaatctgagcctcggtccccagctcttctccctccctgactagtttcccttaccctcaggagcatgccacccatcatggcccccagccctaaccttgagactcctctgtggatccacaaagtgtttgagtaccccccccccgccgagttcctgagacctccctcatcaccctgctttccactctccctcctgaccaaatccttagagacacagcttgtccataaaaataagcacgtgggtgacagtccaccaaactctggaagcttgaaacccacacacaggtgcccaacactgctcacagttaccctgcatcattgagccacctatcaccacagccaaacccaaagttgtcgttcccacaaaatcctgaactctgatactccactccatggccctattctatggtcttcttcatttccttattcctgctacccctgatccctggccttaaagggatcaagccattccttggctcctccattctgcacccctccagaaacagtggcacttccccttgccttaccaagcctacccctccaggtggcccaaagtattctctccctaccaaccccaacaactgttttcctaggaaacagaaatttctcagggaaattccaacctctggccactgccacaaccccccatctccatcaggacactcatgctctctgcactgcagatgaaagcctggcagctcccaggacaggctcccttccttgtttctgtcctttctcctggatacttgtaattagcatctgctgtcattctcccagtaaccactccagtgcatcaatcctggtccagacaccttagaatcttgacaccccctttatccatgaaactggggctctggagtgagcaccacctcatccttttcacattgaacagtactaagatgtatagcatgttcatctgctagggctgccataacagatctgcataggctgtggggctcaaacaactggtacatgctctcacagtcctgaaggctgcaaagtccaagaacaacagaacactggcaggagtcgatgtctgtggaggcctggttattggcttgaagaggctgtctgccttctcaccatgtcctcacagggcctttcctcagggtgtgtgcacagagaagggatggtgctgggaaggctgtctgatctgatttctataagatcaccaatattactgaatcagggcccatccttatgacttcaatcaacttgatttctttacttatgcccaatatagccacactgggattagggctccggtgtataaatgctgggaggcacatataccgtctacgatatgaagccacggcaacataggctctttccctctgaactcagattacttggagcatttttttccttgatggcatttggcctcctgcctgagaccttgttccatttccttgcacacatctcttccagagccctgcctcactagctctacctaagcttctttcttttccatgcgggatataaagaagtataagacgtcgtgccagacctcaaataatttaagaccttcttggagagtcaatgtgaagagacattgaacaaaatattcaagcagatgcagaacagcctaataaatagaccctcatgaatctaccacccaatcataaaagctagccctgggctcctccacataactacggggtcacctcatactcctgtcccaagcagctatccagctacatggacaaagaaggagagttttgtggccttaacattaaaaccctccagggagaaattccaacaagttttcctccagattggcagaggccaaacccttaggagcattcagagggatatgtttggaggtcaggccaacactttcagttctctcctatttcttaaaatgcctcattcagaatgaccacaaggcaatcaactaaaattactttctggaaatgaataatgtgaaactctgggaaagtacagttatccccaggactacccgagttccaataactcaatttcttcctaaaggatttgatggcccttgagaaatattctaaaaatgctgggtaaccttagactggtagataagggaaggctgaacttctgggagggtcacacacacacacacacacacacacacacacacacacacacacacacacacactattgtcttcactagatctctgaagtccctcccttcctcctcttttttatttctctcaggaggaatagctgaaggtttcagatgttcctagtctatacagcagaagtcatccaaccccatctcagggactgacagacagaggcattgcagtaaattcttgagccccagagagtaaatcaaactatattcaggaatcactgggttgatgttttttagtgtggttcttgcctatgacatctcagacactggaaacaaagagcaaggaccatgcacagagcaagccatcttcccaagaaacccctgctgtttccctataatggagacaaacttcatgaccaagatatatagcccccgagattttccacagggaggacagcatttcttcttgggaagatttagtcactagaagacttggaggaaactgtgctggtaaagggaggcaatgaggttaaagataacactgaacatgtcctccccaaagacaaaacaaggagaaagtccaagaccgcaaagtggacatgagaaatgggaatacaaggcagctggtatgtagtgacagtgcttatatttatgtcattgtccctgctgcatattcataaagtaaactgcacttttaataagcaaaccaactgcaggccagccaggcctacacaatgagaccttgtctcaaaacaaatgaaatataataaacaaaaaaaatcaagtatcttagttcattcatttcaaatcatcaacttctctcatcaattttaagagacatcataacacagaagaaagaagtgcctctaggaagagcttcatgcttcagtacctaagaaatcaaaggcccagagaggttgagggactcttgcaaaagccagagctgttaaacaaaccaaattccaacttcagtcctctaattacaaaatagcatgtattctctagaaagagtactgtaagttctgcatagcttgtgtttagcatgggcttatctctattcctagactattttgtccacattgcaaaaatccatgcatctctttgacaaactccacatcaaatttaaaatccccctgtaaacttccaagccttgattgcttgggtctctgcagtgaacacatgcgactctgtggaattatttgcatgcatgactacacagaaagagcagaactcaaaggaactgccagggtaacaagtagagtttgaccattttgttgatggctcagaattaaattaggactatgcattttgctttggttaatgactgctttggttggtttttaagaaaaatagctattttataagccatacagattacatttctggaaggagttttgctatcaacaaaggtaatcgggggcgttggggagacgctcaggtggcaaagcgcctcggacacaagcatgaagacttaagtcagatccccaatgcccatgtgcaaatcaaacttgacaatgtgcatctataactccagggcttggagggtgggagggaaaactggcccatccctggagaaccagttgtctccgtcaaattgatgagttccagattcagtgagagaccccacctacaaaaaaataaagtaaaaaacaattgtcgaagacacccaacattaacgtctgtcttcacatactatgtacaccacacacacacacagagagagaaagagagagagagagagagagagagataccacacatgtacacaaagaaataggtcatcagtttactaacatttacataaagttctgtggtttgtaatgtgcccattaaaaattatgaattagggctgtggatgtagctcagttggcagagcacttgcctagtatgcacggtgccctcagtttgatcccagcaccccataaaccaagtgtggtgatacatacttggaagcctagcacttaagaggtagaggcgggtggttcagaagttcaaggccatggagtatggtagcaagaagcctgctgtttgctatgtggagtagctcatgactgtctactgctctgtgcctttctccagacaagaggggcagatgaaacagagagttcatgcagcaaatacaaatctatgttgtgtaggatgcccactatgggaaaaagttggcatcatctgaggtggtgtggtccatgtttcagagactgcctctggaagcatcactgaggccttttaaatctcccttggtgtccaaaatcaatgctatgatgatacttgacagaaatacaatttgtttcaaatagttcttgaatagcccattatgacattatcacacatttctttgcctgagggctgaacttttctgtcacgttggtctgtgctacattttagggaataaaagtaccataaaatggactcaataaaggcatcctcctatttgttcttgaattgtctaccacaggccttcacagttacctctaaactctgtaattggaaaacttgatcctacatgtgccatcaaatccttcataataatcttctaaagagggagggcgctgaccctattcagacaagccttgtggtaaagctacatgtgtaaggaccttgtttaaaattctaggccaggcggttgtggtgcacgcctttaatcccaggactttgggaggcagaggcaggtggatctctgtgagttcaaggccaccctggtctccagagcaagttctaggataggctccaaagctacagagaaactctgtctcgaaaaaccaaattaaataaataaaattctatacatcttgatcacacttactacctccaactcccgtctcccatgtccccaagacatgtcccaatgtcatcttcatgcctactgcctttttgtaaccactgaattcaacttgcctaatcttgttgatttgacctgatctatgtcttgtgcaggtaaccgtagctgcggtgatgtccagaacacagtatttcatagcactcctgctcaccctctagctgcatactcttcccatccccctcttccacaatgtcctctaatccttgggggagggttgttgatggagatgctcactgagggctgagtgatatgatactatatatgacatatgactaacatgtatgatatacatgatcatatatatgatatatgatcaatggtcatttgttctcagcattttgacctgttttgagtctctacagcaggagaaccctgtgaccaggcagagagcagattctcttttttatatccttcacctaccatccttcactatcttcttaatctaataatgtccctcccttgatttatacatgaaagacttcccaaaagtttgtcacagtggtttctttttgttgttccttccccgggagattatgttaatccttttgagctactataacaaaatattaaaaaaatactaaaaaaactagatggtttgttaataacagaaatcagagccagggatgaaggttgatgatagagcccttgtccagcactccacataaaacctaaaaaaggaatgagaactctgtttttacacttctggaaagtgggatgtttaagatctaggcaccaataaacgaatctggagtctgctgaaggtactcacagcttgtgctgtgtctccacgtgtccacatggtgaagcagacgaatgaccccctcctgcttctctcttaccggcactaacaccctttgtaagggacccacgggggtgacccacttgcctccccacctcccttcctacaatcataagtttgccatttgagagtcgacaagtggattgagagagacacaaactttgggcccagtgaattatttcccatcagaaatgacttctgtggtgttagcctcacatagataagtccacactttgtgcaaggaatgaggtccatagggcacacccaggaaatgatgtaagagaaggatggcaacacatccctagaaacacagatgcttgcaaggaattgctcactaaaccataggcattatcgagctctgtccaggtgttgtccccgcacttcctgcccatcctttggctaaggtgagtgtcacttctcctggaaagctttgcgactcccaggtccaaggtgtacattctcatggaatcccgtacccactcctgcttatcttctcaaccacatttgcatttgccgtttgtttctctccatcatgttcttcaagccaaagcactactctgcggtgggcctacattcaagtatgggccaagtatctagcgcaaagcccaggacagcattatcaatatgttaactacgggaagctggcctgtacattatcaggaagagagaacaaagccccgggggctgaggggagggcagagagccacacctatgttaacaattctgatagaccaattagaacttgtgtgtgtgtgtgtgtgtgtgtgtgtgtaaataattaaaatgttgcagatccagagccaaattttcctgggctgtcttcagtcctcttgaaatcttttcattgcctaaccatgtgtctgacctagcatccttatgaccagcaggtaaaacccttccaaatatattaacttaacagttcctccattgtggcctgcctacctgttatgcccaccaacatttacaaaatgccttggcttttgactgtccatcatgctgtaactagaataacttgctaaaactcttgccatgttgcatggaattcggggtaacctgaatgcatgttcctgggccagggtcactcctgactggttcaagaataaagccttactctccccaggtgagacctgtgttctacatctacagttaggcagcagcactcctgactgaggcccattagaggtggatagccacaccctccagttgcaacaaccagatgtcaccagctgggaaaaactcatgacttgcttagcatgcacaaagttctgagttcaatccccagcacctctaaaaaagataaaagagaacggggagtcagcatactgggttacagtgctccctgcctcacctgcagtgtgaggtcctctcagccacccctttcccattatctgtttgtcttttctttcccatggcccctgcaagtcggggatagtaccttgactgtcggttactgatccccgcacagcctgtctgcgtgctgtcccactaatcgcagcccctctgcaggtccaccagaccacacagggcactctactcccgtgtttgccacgctgctgaagactcttgctggcttcttcatgctctttgcaaaataataaaatctaaattgtagtcatgaaagcattttgttaaggaaagatgaaaacaaatgatggatgaacaaacaaatgaaaatgtaagttaagttatatagcatccactatgtccataattgtcctaattagtcttatatgggaagtagtgtaaatatacaatacagagaccaacaattttcaaaaagtttgtatcccataatgtgcattttgtgggcaacttaaacaaacctcactcatccgtgtcatgatatagggactcatgtaagatgtttatgtctttaggagtcgtttttaagaatgccgactaacgtttctcatggcttgtgggggaccaaaatctttccgctatggaatattttgagatccgtcctttggtttcactaaacatggagcaccggaaagcgctggcccactactgtattgttaatgccagtaaggctactattgtttaccatggcctcagggtaatacgcctcttatttgcatctgtatgtgccaggccctcacctgggcggaagagccagagatgtgtggataacttgtgaggatggaaggttaggaggagaggcgagctgccagagcagcgagggaacacagagagaaataattccctcgtggtattggcaggatggttaagaaacaccagaaaagatggctaataaagaaattactctagttccacaacatggaactgagagctctctaaagatgacaagatgccagtgtttgatctttatcgccgttgggttgctgggagcttccaggtccacacacccccactcaggccgaacctcatggctgtcgtgggttaaagctgagacaagccaggtcacgacaatggctgggagaaagaacagttcaatattgaatacttattgacacaataccacatatgcagtctcttccgtggtctagacactgctttaacacaaactgaaccacttctgaactgcagcgtgcaaaaggttcataaagcaatttctcccattaagaggcagtgagcccgatgggacatgtttgttatgtggactgggttttaacccaagggattaggatccatcccaactaatgagccttttgcacttgacagctcttccttcccattgcacacaatcaccagtgatcctgtgagtcctcccggtcctaggaacgcctggggtctcagccatagaacttgtgcatcacccactcctggcccttccgtaagtaaccctgcccttctgtgccaatgggtttgctaacacagcaatacaattcagacatgtaatctggaaaagaaaaaatctcacacccagatgattaaccaggctctctgttcagcctcagtcctggccccacagcaatagtgacctcacaggagcaggacaggtttgctctggttcagtcctcagtggccattttgaaagtacatgaggagaacagatggagcagtggccacaaatgaatattcataaaagggaatcaattaccccccttctgtgccacctgccctctcaaccctacttagcccgcagctgcgagagacaaggggggctcacgctcatgtcacctggaaggcattcaccgaggccaacagcccagtgccaaacctggagttttggcacacctgacctgaaaagatggaacattttgttggttttgacctttaaaacaagaactaatgccatagcaaagtggcacacgccaatggaaaggacaggaccttccaagccatgctggctgcggctcagagatcagggctgaccccttttaactccttcccttggttctgatgaccccacactgagcctcactcacccacagtatcctcaccccctaaatttcccacagggtgaggatagtacccccattaggcggtgggctggtctgggccattgtgtcaaatgggaaaccctcatgcaaccaggaatgagcaagcatggcttcctcctgcccccaccaggggagagttccgatttgcaagcatggagaccatgtcaggactctttaaaatggcttactgggcagaggctctcactgtcaagcctgacaacctgggtcagatccctagacttacatagtggaaggagagaattgacggctgcagatgttcctcttatctccacatgtacactgtggaccaccacatgtgttcacatagatgtgcatacacatgcaccaaataaataaatataaaaaataaaatatttcagggccggtaagatgactcagtgggcaaagcttgacaacccaagttcaatccccagaacccacataaagatggaagagagccaaccaactccacacagttcattgtgtacccacacatatagacaataataatgaatgctttttaaatgctacttcagcccactctgtggagacggacaaagagatgggattcctagaaagttatgtaacttttcaaagagctgaggcacacttaaagaattgatgttaatctgaaatacttcttggtagtcggttgttttaaataataaaggtctcttatatacaggttcctccatctggagggctagcatggaccaggccatcagggcttgcctagcatcaccattacaaactgcacttggaaaagggctttaccaaatggcagaaatgaatggagtcaaagcatcaaggtcaatgatggaaaactaccatttgcacaaggacctcggttttagctcaagtggcagcaggctccattgttcacacactctttcatttgctgctgggtcttccctcttataactcagtccccactcaatgagaggcaaagaaattagtaacagctttgccccagattcatagttctttcatatgtgtgtacaagtgtatgtgtgtctatgtgtatgtatgtgggtgtctatgttttcgtgtgtatacatatgtatgtgtatgtacacatgtgtgttgtactcttgcttgccaatgtccgaagagtccagaagagggcatcaggtctcctggagctggagttacagtgtttgttagctaccccatgtgggtaatggagcagtgatgctctgaagtgttgagtcaaatctctagtcccctgaactcacaatccttgatgccctatccccagtcttgccataaaccatcctaacatggggactccaacttcctaccataagaactccagccatgttaatttaatctcctccatgtagggggcagtgagactggaggaacgtggcagtcaaaaaggacagacttgtggaagaaaactgattctgagggcaggagtgtaaatagtggtagaacacttaaggttctgagtgccggccaccacaccacaaaagaaaagcaagccatgcctgcccttcagtgtttgtagtttgcatccaagctgcctccttttggttttcttcatttctttccccactctgttcatctgggtgtatgtttgaaaaagcagcaagtggaaggaagacaagaaagaatctaggtgattgattccccacctggaaactgccctcgcctcttgattcaaacctgcagaaagagaattacattattctaatcaagggctccaggacagcacttccatgccaaaccgtgacagggagcaatttgttggagtcacctgggcccctttctgcctttcagattgtcaccagctccatccctgcaagcaaggacagattgcaggcaccctggagcgcctgagacctggcttccactctcttttctcacactgctcttgaggtggaacaaagcttggcttggtgttgcatgcaacacacctgtcttccctctcatcctgtaaggctctcctggacccccccccccaaataaacagagactggaggctgaaagaaaaggggaagaacctctagtggttatcgttaagacacatccagcctgtggcttcccacaatagctaaggaagaaactcaaagcaaaattagaaaattgcttaaaatgctacaagaaaatttttgtaatttttttttaattcagtgtagttctcacgtgtgaacttcaccgacaccatctcatggtgtcaaaggtggtacatatctagtcgtacaccattaaaatccctaaggccgtggttctcaaccttgctaatgctgtgacccttcagtacagtgcctcatgttggggtgacccccacacatacaccataaagctatttttgttgctacttcataactgtaattttgctactgttatgaatcgtaatgagaacatttttagaggtagaggtttgccatagaggtggtgacccacagattgagaaccctgctaagatgtctaccccatgttaaaggtgggaacataaaaaaatttcccctcaaacctgaagtgtgcaggatatggaattaaaattttatgttcattcctccttcttcctcccccttcttcctttcctgtcccctccccccaaggaaggttttcgtatgtagctcacgctgcctggaacttgcagtcattctatctcacccttcaaagtgctggaattataggtttacaccaccatgtctagcctcctcttttccctgagtgacagccatggaggggggtgacagggtacctggtcattcttactcaaagtcaggagctggtatctgacactaaactgtattgaaaatgctcaccataccacccagccagcacagagaggggaacatggtccttgctccttctgaacctccagatcagagaagcaaaccccttttccagctgtggttgagtgccttcctgctgggcctgaatgcctgccctgtcccagcttggattactggctgagactgagaacacccccattgtgtgggagaaaggcattgtccagaactgtcagggcatgatcatacacagtgagcaggtgggcggggctgcaatgtgtccagggtagctatcaaaaagaaaataaaggacatttctatatctgccaagacgtcacaccccatggtttgaaagcaaaactcactgaccttcatactgctcgcagggtctcatccatctttcccttacaaagtccccagcctcttggtggccttccaattagaccaggctatgccaggaaaccctgggctcccaagacatacgagaatcccagcctacaaggagcctgtatctctggtgtaggaggcataaacactttgcttgctttctcctatttgtcttaatcaacccgtgactttcctcagggtctctatagaacaacaataagaaaatgtaatggaaagagagctagggaccatgtatacacacatacacagagagagagagagaaagagagggagagagagagagaaagagagagagagagagagagagagagagagagagagagagagatgctggagcatgcatacgccaacacacacacacacacacacacacacacacacaaatttttaaaagctctaaaaaggcacataaaggaagcctttgtcaactgtgctgccaaaatgttattcttttgtttaaaaagaagaaaagagaaatattgagacagacataagattataagtttattatatggcccggtagaatggggagactaagaagaggaacagggtaatggctgaccgccatggccggtcgccatagagagacagagcggggaaacagagagaggggacagagagcaggaacagggggagagagagagagagagggcaggggcctatcttttaaaggggtcctctgcacctgcgtacagacttctttcccatggaaccttgggctgaccagggtattgcctgagtgaattccaccaggtaacaggggcagaccagcataatgcctgaacctttcagtgaggtcagatttgatgggaaagccccttgtggtacaggggcatcaagaatgtgctgagaggaacagaagtgaccacaggaagcctcagattctgatgtcatgttgatggtgatgtcatcaattctccaccttccatcctcatcctggggaccaaccctataagccctagaccaaggcccgccctgctgacagcccctggtcagaaacacctctattatctcaaactgggcgtaggtaaccaggaagccctccatcagacattttctcctgtcggttaaaatggcacaccattccccaacagagcatggaggaccttccagagcttcaacagacacaaaagggaaatgactgaacggaggaactcttgaagtgggagtgccaggatgacgctgtagctgctgctaacccacctaaaggtcactactcactgagcccaaggacagccaactcttcctcacagtcacctttgaatttgtgggcctggccactcttgaagcatttctcttggcagagatgggctcccaccaggtagatgaccgtgactgtgtctagaagagagtgttgcacttgcggctgaggagagtgctgcacttgcggctgaggagagtgttgcacttgcagctgacttgactgggcgcctgtttcccatcccattccttcctgcttattggctgaaaatgggagaggctgaccaaggatcaaatcccaacactgccaccatttaactgtgtaagcttaagattgaccttgatcaacttcaatccttgaaagcaagagaaaaaaataaaaacttgaaaaaaaaaaaaaaaacgaatacacaaacagtagtatctataaagcacctggccaggttccttcagaaaaactcagtctgtgctatttgccttgactttaactcaatttccccaaatataggcactacttatggaggaggagtaaaaaagtgtttacagtcaaatttgaaaagaccttggttaagctaattgaagcctggcgaggtagccagtgcctatgatcctagcattctcaggaggtggaggcaggaaaattagatagctccagctggcctgcaactctcagagaccttcagtgctgagattaaatgcctgtagcgctacaaccagtgaaactcagaacttttaacttgctgacacatgaactgtgaatctccaagaagtgcccaccttcaggctttccaggccactataggcacagacttctcatcatggaacatcgcttacagggtgatggttattcttcataaaacgatgcttaagatgaaggagaatgcaccagttccatgtcagtttctcaaatgctgtttgttctccttgagaggcatcaccagggactaaacccaaatcacatccctgctccaagacgaaagccctgcctacccaaattctcccttctttctaagaacagccagcatcagcccagcagccaccattgctgagaatgggtacctaaacaactttagggaggaagcatttattttggatcatggaatgaggctaaagcccttcatggtgggaaggcgtggtgaggcggatgcctgcagctgctggtgggagcatgatcttgcttgctctctgtgctgtcagggagtagaaatggctgaggaaatggggcccaagtccatctcccagaaatctgcctcctgcagacaagtgctacctcccaagagacctacaacctcccaaaacagcgccaccatctgacgagcagatgttcaagagtgtgaacctgtgggggacggtcacacctgaaccctgatggctcacactctgttgatatccccagcacttgcttttctggaaagaactgagcccaaaataaaagtgcagggacgacctctttgcagtttttcagggttcatctcagtctatgctcccccttcaaatttacaccaagtagggattcttgtgacagctgtggctgcatagaacttttcagccatttccactaactttacatgtccttgtactagaagcaaactgaagactcccgtggcctactaccaaagaaagaaacagagaacaaggacatttaaggcagaacagaaacagctgtcagagaggatccctggctcccccaggctacagcataaccctccaaaatgaaccctatgatcatggcttcagttcttcagatcctggcaagctgcaacacaagccagttctgcttgcaaggggctttcagtctgccaagggaagggattaatatgcatagccatccttccaaaactatcgggcatgaagaaccacggtagacacttttgtccaataaagccttgcttatgatccagcctaatagctctgtgctttggtgtgtggactggattcaaggacagtttatccctgcatgcagacgagaatgtcagccgactcaccttcacccatgtctcctgaacctggtggcacacttaatcctgctgctaagtcaaatacaaagaatggcagctcagaacggtgggtgtgttggagacagggagccgtgagaggaagagttaatttctcctcgatctcacttccttaggacaactccctgctccctcctccctccagctgtgctcacttactcttaatgacacctgactccagccacctggctccaatgctgcagacgttattgcttcagagtgaagagccatctcctgaggaccagcgaggtggcccagagggtacagatgtgtgcctctgagcctggccattagagtccaatccccaggagccacatggtggaaggagagaactggctctggtgggttatcctctgagttcacatgtgtgctctggcatgtgtgtgcacacacacagacaggcacacataaataaatacataggtaagtaaataaacaaatttttttttaaaaaaaaaaggcactttataaggccaataggttaaaacacgcccaagaatgcccatggacagcactcattgaccaggtaatgccaaaagtgactgaggatgacatagctaccttgaaattgatggcatcagattcaatcgttgtcatggggccctcccagagcatgtttataccactggacacaagagctgtgctcccggccctgttgtgatcttgcgtaactcctccctcacagagcacttcctggcacatagcaagcatttgggtgactagaggttatctctgcaaggctatcgagattatggtaggcctttgtgtaacaataagtctttccgccaagccgccagcagccctgctgccacttgggcgctttccaccagcagcccaagttctgcccgccgccacattaaggtcccaagtaacacagagagacttatattaggtacaaatgctgcttggccaatgataggatttctcatctgctagctcagtcttaattatcataaatctatatattttataaaacttatcagacgccagcggcaagcatcctgttttccccggctcacatggtgactctgcgctttctcctacatttcccagaatcctccttgactcctagtcccacctaccttgttttcctattggccaacagtactttatcaatcaaccaataagacaatcatatacacagaaggccctcccccatcacctttgtaggaatagccacatgtgttagctattttttctgttgctttgatgaaacaccatgaccaacttatagaaagaggggtgtatttgaactcacggtagcagagggataagagcccataatagggagagacatggtagtttgcagcaggcttggtgggaggaagaggaagttgaaagctcccatcttcaaactgcaagcacaaagcagtagagagaaaagtggaagtaggcaaggcatttgtactctcaaagcccacctccagtgacctgctgcctctaacaggacacacctcctaaaccttcccaaacagtgccaccaactggggatcaaatgttcaaatggctaagcctatgggggacattctcattctaaccatatctcatcatctgcctgatacatacataaaactagacaaccaatcagagtctcacatttaaccgctcttccccaggcaggtcctctctgtagctggccctctatcctcaggctccacatcagcatccttgagcactatttgcctatctctgaatacaagtaataaattgtcacatctgtctcttctaccctgtggggaccatctgggacaggattcaaggtttaagcatcgtatttctctgacatgtcacatccctagcctatgattggtctgaacatttgtgaccactgttaaagcccaatcatatagccaacttgaacagcatcacccagatcttcaacgttagccttctaatgattcaacataaatggtcaaaataggcatcaaagcatgcacaaccctcttcgaccttctcgctccctcccttgacacacgggacacacagctgttgaattcacatttcttcatttcacacttacttatcgactcctcacactgtgagtgattctgtcacagaaacggaagtctccacatcacgcctgcatctccaactcccctacctcaggactgggctgtagaagcacgataaagcactttcagcctgtgccgactcatgtaaacgcacacacccagagaggcctattcacctagacgtgaaaaaagaccattagttctcagcccaatagggctacagggctctcaattacccaaagcatgtgggcattcttcccatgctgcagagtccacaaaatctacactcaagacctatagagaaaggagcatggggatgccaagacctagcactgctgtggtttgctggtaccctcagtgactgtgtctgtctgttcccagcagtgcagaaattgcctgtgctccacagggatgctgcctgaggcttccagcgccacccagaggtccctgggccatgtgcagtctcaggaagagaaggctgaacatcagagaggacactgtgggctgggcgtgtgtgcgggtgacagagagctgaagatggtgcaggctgaggcgatgcagcctaacttccctgcttgccttctgacaagaataggccagggtcaaagtgtagctccctgttacaagctgtgaaacttcagatgaacttcattcgccccctccaggtctttgttaatctgtaactgaaagatggtgtccctgtgtcacggggctgccatgaggattaggttaacaaatacatataaatgtgttggggtcagacctaaggcactgtggtaaaaatctattattattctgtagacactggtctgtctgaacatctcactgggggccatgcctctccaacagccactcattcactttgctctccttcattttttcggtgaacaccagatgtttatacacaggtgttcctcatgacttctgcgtggcccagaacaaactccctcaaggcccagctgtctcttccacgaagccttcctggctatccccagcagatgtgtccactcctcaacccctggaacacccccggcttcctctcttgcattgtttgatactttctcatcccaagctgactccaaagtcccctcaagaaagaaccagtggcggagtggtcttcacgtgtgccagagcagcgcccctcacatggagtgcgacctgaataaataagcgtgggacagaggagactttagggtggagaccaagggaggaaagccaggtttctccctaacgcctaaaaaggcagacaggaggctatcagtcagcaaggcattgattaaaacggaacagatttttacgaatctttattatatttgtgtgtctgtctgtctgtgaatcatgtttgtaggtcagtagacaactcgtagtctctccaccatgtgggtttaagttgtcaggcttggcagcaggcatctttatctgctaaaccatcttgccagcctctagaattattttagagaagaaggaggaggagaagtagaagaagaagtactaacttacttcttaagaaacagaacgcttttctgtgaggcaccatcttccaggcatggcacagcaatggcgtgcctgagctcacagctgttgagatgacgtgcacaggacaaggccatcagcgtctcaggaggtaggagggatgctagaagcccagctcctccctgaggaatcatggacagttaatggctgctggggccctttcttcagtggtgtaaccactgctgagttccctgtgctctggtaaataactttccatctgcatttctacaagcagccctaatgaaacaataacaacaagacatgaaagttgaaatgggacttgttgggaagagggagggggcaagcaggagtgggagggggacaagagagggtggatacagtcaaaatgccttagatacatgtataggaatatcttaatgaaagcccttattatgtgtaaagaacatacgctagtaaaaactatcaccctactgcctatttaacctgacaccattctcctcacttttctccctgtcaaatctctgccgcagtggcctgcatcaataccactgcagactttggagtatttgacgctccaaaaatgtcagaatctgccccacagcattttccagaaacttagctctcagaatgctgaggtgggtttccttctgcaacatttcaaactgctatccagcccctttttcttgagtcttttgctcagttcccaggcaaggaagcacaaaccatgatccagaaagagacagcctgatcatgtcacaactgcaagttgacaaaacaggcacaagctgggaccccaggcccataccagaactgacagagaaaacatgggtctaggtgacagagccattccctctggaccgtcaccacagaagactgacaatgccagatcccagacttgtgactgggcgccagatggctcaaaatcacctgtgaggccaggcctgctgcgtgacttcatttaatcgtgtgttttgctcatttggtatctgcagccagagcctctggcagcgaatgtcctttgccaccagttcaagcaagaaaatgtacctgtcgtggtcatgtttgcttccagctgctggcttattttaagaactagatctttcctgttactctattttcccagactgacaagaataacttgcaggccaagcagaaatccttgtatgtagtgacctagtgccacctgctggccaattgcttagcagcaaccaagaggaccgtggaggtcctagtgcagagaaaaacgttttctcttgggaattttacatgaattctcctctacttactcagctggaacactttgcctggaagtcttgtgatctttctaactttgaggcaaatgagctaaagcccatggcaccaacaaggaatctgagcaagctttttacttgagtcttgcctcgcccatttctttggcagctgtggcttctaaatgatgagctcatgacagacaagctaatgctttctccaggtgtcccaagcacagacgtggagaaagatggccctcccaagggacctgatgcaactgtcttgtcttatttttaacctttcagaccaaggtttctaaacttggggtgcaagattattctcacagtgccatgtcaagaggtagagagtgtctccactgtggccactgagaataaataggctgctggctggatgtctcccaaagtccttgctcattgcctgcccagtgcatgaagtgtgagctaccagcgctcatcttctagcagcatcagagcccctgttgcttgcagatgtttagaggtggggattttagaggtggaagctgcctgtccaccacaaacatttaataatactactagactttttgcccaggagatgccaatagcacccccactccccaacgccatcatgttataacaaccaaaatatctgcagatgttgccattggctgcctgattgaaaaccttgtgtctagaactcaagtacacaagcctagtggtttggatgagaaatgtcccccacaggctcatgtgtttaaacacttgggcccagtaggtggcactgtttaggggggctgtgttgggcatggacccttgctggggcatgggagcctgtagttatcaacctttgggtttataggcaggtcctgcttggaattcactccctgattctatttctccccctacttccctgggtggggaacaaaccacaccacaggtgtgccatcattgccttctctaccatgaaggactaaatgccctaaatcgtgagccacaatgaccctctactctcttaggttgcctctatcaggtatttggccatagctgggagaaaggtaactgacacactggagaagcaagatgaaaaggataccgggaaagcaaggtaaggaggagagctgggaggaggaagggtaggaggagtgggggagaatggaaggaggaaaggtgggaggaaaggggtgggaagaggggtaagaggaggaaagggaaggagtggggaggaggaatggcaagaggaggggtgggaggaggagggtggaaggaggaggggtgggagggagcaggaggaggaggcatccactaccatttaacacaaacaagctgccccaggaaagtaacggttaagccaatggtcttctaaaaggcacaaattgtgtgcaaagagctccgtggctctctcttgtttaacccatgagtagtctatattggctctctaaggaaacatttgctagacccaaagaaactaaacttcaaaaacgtcaagtcacttggcccaggtgtagcagagcaaccacaggaaaccaggatttcctgcccccaaaagagatttagcaacatgtcccaatccaggacagaaagttctagaacagtctcaattctcatccatgctgctacagtctgccagcacagtcccaacaatctgcctagatttagacctgcagataaaaggcttaactattctccacaagaaaaccaatccaatgtttccatacctggggaggggagtgtatttcagttctgggagtttctgatcattcatttacaagattaaaaagaaaaatctttatcagtggttttcaattttgcctccaaataaaaaatcatttcaagggcttttcaaaaggaaagcctaaaccacaccacagaatagctgaaggggagtctcagggacagtgacactctttcagcaccctcatctttctgaacaggattcaagcctctccttccagctacagtggggatagtggcccactcagcaggtatgcagaagcagtttgggccataccactggaactatgagccagggttcatagtctctgtcccttcactgtttgtacaagtgaccctcctccggcagaatggctttgcctagcactttcgagaacagttgataataaaaatagaaaattccatgcccattatctcatgtatgctttgcaaggacccaaaggaaatggttccatcaccatcttcttcatcttccaaccctccgcaaaatctcagttaaaggggacagcagaacacaggagacatgaaagagataagtggagcatgataagggtgaaagatttacggggacaggagttaggagttgaaatggcaaggggtggattagccaaaagtatgagtacatgaagaagcctaatgaaaacctactaactttaagatatatagaaacagatagatgatatagatgtcagatagagagatagatgatagatagatagatagatagatagacacatagatagatagatagatagatagatagatagatagatagatacatagatagatacatagatagatacatagatagatagatagatagatagatagatagatagatagatagatagatagggaacagaagtaccttgtatgagtggataatgctgtccccagaagacatgttattaaatgaaagtctcagtgccaggcaggcactaccatgagctattggttaaggagaccccagaggcacccacaacaacatagcccaatgctattgccattggctgcccaccgtaactatatggtaagaccctattgctgaagacgccactcacttttgacgttcaacatagagaaatcacccttgaactggccaggaaactctgctggctagcttgcatagtgccaggggtgctatgcgggcctctggaggcgaagggtcaccaataatcttacacagctgtgaaccttgtatgcagcaacagtgacctgacagcagaaagtgtccactggaatagacggcgcaacagctaggcaggtaaacaatcgctgtctgactggatgggagtcttgctccacaggaagaatgccatgcctggtaccggaaacctggtcaaaagcccctgactggggagatcataggtcctgtggcagggtataggtacctactaacggttttttgttgctgttgttgttattgtttgtttgtttgtttgtttgtttttgctaagtggtcttcccatcaaactaccttcgaaatatgtatgtttatgccaatagattggtgctgctctcaactttgattagagacacttccctttgcagtgggtagtgtttcgtgaagacacataaaacaacaggtcaaagtgccgagcataaataactcggtgtacggctgcagatgggtcgtctgtagagacctagcaagatcagggaacttcaaagaaggcaggtgaggcagggaaccgagaaacactgacttttggacctgacacggatgctgcaggcatcaagtcacagcagttgtggctacctgctcatggcctaggagatgaccccacaccggtgtgagcgcgggcagcattaattgggttcaaggggtaattgataacaaaaaaaaaatttttaaaagaggacgtgaggctggatggggacggggtggcgacactagagggagctagagggggcagtgggttagtccacataatcaaccgtcgcataagcacatgaactctccgagaataaaaataacatttaaagtaaacagacaaacggagaagaatcggggaggacacgacatactgacagagtcggggtgaggctccacactctctctctaaaggaaggccgacctggaggcaaacttggcccctggcagagtaggcgccaggcctgcggttacgcgggtctgccgctagggggcgctgtggcgccgctccgggcgtctctgacggcggcggccagggaccgggccgctgagcctggggacgtggacaccgccctgcgctgtggccgacacgtggcagccccagtccgccagcccagcttgggtccaaggtcccgtgctgcgccagggcaagggcaagggccgctgtgccgtcagagccggccctgtgttctcggggacgccgggtgccctgcgagcacacagaatgaaggccgctttcagtgtgtctgggccgatgcagacacacctccccctgggaaacttagaacaaaggaggaaagggatgtaagctacgccggtaggaaggcttgaacatgtggattaaataaaatggataattataatccattcctctattttgttagcgtggttgttacagcttatcagaatgtaatgctgtccaaggtgcctcgggagctctatgagtccatttaccaaaaaggggaacaggagaaaagacaaagttcccaagaaacctctagtgtattttccggagcccacactgcgtgtctacacgcggctctctcagcgtccggctccggctaacaccctgcttctagcctgctacaacccctccttggggaaggaagggcggaaggcaggacccggagcagaagcacggtgtccagcactgacacgtgccagaagtgaagtccatgttccgggaagtccttccaaaacaaggacagttgtccgtggaagatgtaaccacaatggtgctgtgtaaacacaagcttttacccttaaaatctttgactttggaaaaactggagaaaatgcagcaagcagcacaggatacaatccgccaacaagaagtggcagcgaaagaagaccggcaaatagcccactgaccaggggacaacccctcctacctgttcacgagctagaaccactctacagcaagctacaggccgaaaacacatatcaaacgagacattcagattctaaaatacaaagtttgggaactcaagacattggtttgtgttaaaaagaaaaactttgaaccaacttttattggattttgaaagggtttttaaaattgtaaattacctcttgttatgagtgtaagaaattaaatgtatcttttatggggaaaaaaaaaaaacacctctccttaacgccctagctctgcttcatagtgccctgcccggatgtcacagtgcagcaccctggcttcgcctcgggagaggtcctgccacacaccagcatcaccaaagctgccatgaccagtccttacccttcggccctgtcgccgccccgccccgcccccgcccgccccgccccgccccgcccgcccgccccgccccgccccgccccacaggtggtctgcaagcacctgcacatgttttctgatttcctttctgaacctttcaactccacaaattatgtgggagctgaatacacgctgggctcgctgtgtcctgtaggtttctaacacgcttatgcccttctgtgaaagctcactgcaggaaaagccatcccagactggttcattggtcctgctctctagacccgcccgccgccctcccattggtcctgctctctagacccgcccaccgccctcccattggttctgctctctagacccgcccgcctcccacccactggttctgctctctagacccgcccgccgcccgcccattggtcctgctctctagacccgcccgcctcccacccactggtcctgctctctagacccgcccgccgcccgcccattggtcctgctctctagacccgcccaccgccctcccattggtcctgctctctagacccacccaccgcccgcccattcggaagagttcagaatagggttggaaaaacaactcagcactgcactgctctagcaaatgatgcaagatccagttcagttctcagcacttgtaactccgaccccaggggctccaaagcctcctctggccttcgtgggcattgtattcagcacatacagatggacatatatacccataactaaaaataaaagtaaaatctttttttaaggagttcagaatgccttacaactggtgggtgtggtctgcattttgataacctgggtctttaacacttaaacactacagccttgcccctgcttttgttgtctgcctctgaagagagacttcatgggcagagttaagcaatgtgagttcaaatattcgcttcagaggtcagatcccggaaatccaagactttcagccctcttacaacaaaatgacactgggtttagatcccttccatctttaagatgaggcagtcatccgacgagtaagacatgtgaggtctcagagctaccccctgaagtttatttctaccctgcagggtatgggcaagaactattatattaataaggtaaggggtggggatgataagaggggcaggaggagaattaaatgtcctgaaaatggacttccagagtcttccttaaaggtaatagagcaagaactggggaggctgggaggtgcagagtgagtcacctgcctagagaaaagaaggatgcaacttgtttgtatcagaaaaacaaacaaacatcaacaaaaaacggtccagagtacatgatccccatctagagcagagcccacatagcctggaaaagtcctaagacaccacagtgtgctccgttctctctaaaatgagcatcccacagtgttcaaggtgtcatttgggatttggagaactgccagaacctcacttcctctcttattgggggggggcggtgcttgcatgtaagtttatgtacatgtgtacctggtgcctgcaacagccagaagaggccatcagatcccctggaattggagttagaggcagttgtgagctgctgtgtgggtgctgggaactgaacccaggtcctctggaagagcagcaagtgttccttatttctgagccatctctcctgtgcccacacacacacaccactctgcacacacacactacacacacacacacacacactcacacactcacacacaccactcacacacacacacacacacacacacacacacacactacacacacacacacacacacacacacacacactacacacacacacacacacacacacacacacacacacacacacacacacacacacacacacactacacacacacacacacacacacacacacacacacacacacacacacacacacacacacgttggtccttaattcctcctgtgtgtggttcagaaggcgcagcccttcatggagacctcctagacgaagatgcactgttttgagttgggccattggctgatctgtgctctgttccctcactaccaagtccagacaaaaagcccaccttccttgtcttcccagagttgtacagcaaggctaagaagtggggtcaggagacttcaagatgaagcatacagagatggcaaatcagaggacccccaaacgaaatgcagctgtgtttattaaccattggctgagccccagacaatgtgtgctggaggatcagagctgagcctgcttgtcctcagtgcgtgggcttctgtctggaggaaggaaatgggccatccatcttccagaaggctcacttaggagccaatcactcaccggcaacaggagagtggagtgggctggttaggctagctggctggaacatgctggatttcccattgcccaacactgagatcaaaggatgtaagctaaagctgatttactccccaggttgaagggatgttggatgggattccaggcaggtatgcacgcaagagcatgtgtaagccagcttacacatgtgggtcatgtgggctgtggtctccccacagcaatgccgcccacagacaggctcctgtgtgtcttcagtagacagcaagatttcagtagacagacagaccacacacactggagtcaagctctgcccacctccacccaggcttcctgactatccaagacccaccctcagcagccagtagcaacttccactttgtgaggccttctggtctcctcagccaacttgacagagaggtcactattggcttctgcctggggacttctgctgtgccacctgcctgagcccagcacttctggtatggagattctgcttcctcttgccctggggacctggggaccacgctctgcctctcttcttggtaccaggccctctcgatgttttctttctgcttgtgggagaaattggcttcgtgggggagcccttctgagatgcagcctggtctgagccagaagctaaggttgcattggatggtcttggagctgctttctgagactcctccttcagcaagtccaaaaccgtggctggaaggtaaacatttattcaatgagaaagcaacaacctgggaaatggctgtgaaaaaaaagcactaagggacttcacagcctcctaagagacagcacttttgctgagtactccaggctcaagcaatcctcctgtctcaggcactggaagtgccatcacacacagcttgccatggtatcgatatcgttttaatatccttctctggccctgcagtaaatgccttcctttgtggactggggtcactccagatatgggttgtctgcctaagatgctatcattcaactcgtgagtcttctgtgactccccatttcaccacagaccctcgtgatactcatttctctatgtcctcctcccacttgacttggaatttgtacaggtcagagatgtcaaacattcattgctatagccccaggtttagcatagaacctgccacaaagtaagtagcaataattatcaccaaacgaatgaatacataaataattgcattaattaattaatgactagagaacaacagatcatggtagaagcaggcatctcgctcattaattctggtctgcaggacagatgtatacactgagctccaagttaataactctcacaactcttaagagagaaaccgtgaccgctggggctcaagatgcccgagtcattaaaaactcttgctgctcttgtcaaagacccaggttcagttcccagcatctacactgtaactcacaaccaactgtaactccagttccagagtttctaaagcctcattccggcctctgcagactcctgtgtatacacagggcacatgtataaatacaggcaaaacatccatacatgtaaaataaataaatcttacaaaaagaaatcaaagaaagtatgaccctctaccctggggatttgctagggatgtggctgcaccaatgactaaaaaaacaaaattcagaaaggaactcactgacaagtggccggaaccggatcttcttggttttggttttcaccggcactggcttaaatctgcacttgcctggtggggctcgcctagaaacacagacagaaagggtgatgacacaagactgtgaagacacgatttggcaatcaagatcaccatagggtatactggaactggggtgggtcctttcttgtccacggggctggatgggtgtgacagcaatgtgccctgagctcagatggagaggagaaaggctactcggccttctggaggcagtgagaaaaggttagcatgagcctggtgataggcacccctggggcccacatcagaaatgtaataacagcaataacaatggtttccaatgactcacagggagatagggaagtttacctgagagctagttgtgtgctgacaaaccataagtgatcgatgaagaatggagtttaaacatgaaacactacacaaggcccagcacataataagtgctcagcagatgatagtgacagctatggcaatggcaattgggaatcccttcaaagggccctggcacagaagctaaggacggcccacctctctagctagcattatgctctttcttaaatggcatatccctgtgtgcaacccctgtgtgaaacaatggggctttgggcactgagcagcaatgccccagccagtcctctttgcccccatcactttgctccagctctctctccgatgccactctcaccccatgtaggcaagtagcttaacttgactggttcgtctgtcttcttggcatcctgtcaacatgtgtgtgcataaagcttgctgtggtccccggagcacattgttaataaatgccataacaaaaagaggtgaaaaaagcctgtctttgtgactcacacttacagcccaagcactcaggaggctgaggcaggagggttgccttgagttcaagactacataatgagtttcaggtcaacctaggaaataataagaaacacccctctcaagaaaacataagtttaccactgctttctgtctgtttttttcacagctctcttgagaaagagagattatctcctaggcaaacttaatcataaaagtaccaaaggaggggtcatggggtagtacttctgtgtatgttcattttttttatttttttttttgatgcaaactgcacgaggctttattgttgtttaacgagctaaccccatgttagctcgggccttccatccatccaccatggtggatggctaggaaagacagctcgaagcgtctgcatagagatcttatagggcagcataaggggagtgtctaggggtacgcacaggctcaggattggtgtgcctccaggcttggagggcttgccctgtgttgattggtcaactggttgttatggcccataggccctcccagggtggttgctatgctctgcgattcttgctgcgcacttgtccgtaaagcacacccaaagccgtaaagcatagcgccaccagctaacttctgattggttccttgccacgaggcaggcgcctaacctcctagtgaccaaagcaaggtcagacaagcacgtgtgtatgttcatcttattgattgttgaataaagtactgtttggccaatgaggcagcaagttaggcgggactaggagtcaaggaggattctgggaaatgtagtaaagaagtggtgatctaggcaggaagtgacatagcagggagactcatatttaaggaaggacaagcaggaagtggtcccttgtccctttctctctccctccagagtcaccatgtgatcccaggatgaggacgccaatggaaggcatccgataagataatcttataaaatatatagatttatgataattaagactgagctaacagacgagaatcctagtcattggccaagcagcatttgtacctaatagaagtctctgtgtattatttggggacctaacacagtgagcacaactcaagcaggtggcggaaagaattatcgtaacagagaggaaagctcttaggacaaagaacagaactctctgtccatgcagcattgcccacacagagctggactgctctggccagagaacaagagctgtgcacagaaacagaccatggttgaggctgcccagactaagttcactctgtgccaatccacactctactctgagcagggcatctaagccacagccttgagaaccaactaaacctctcccaggaacttctgagatcacacagatggagaacccagttgttaagtgaagctatgctggaccctgagcattggctagtcctatttgtcaactatccactgaaatctacctcagattgggaaatgagcctcagagggagtgctgatctgtaggtctagctatgagccaattcctgagaagaaaatgacagcaactctcaccttgaggggtcgacaaatttgtaaatagatccatgtggagcataggcacttgggtaggaggtggccaggaaatacagctcccctaaagaaacaggagtcagcaacaagaacaccatatcatcagggctgagacacgtctgaacacacagaaaataacctaaaggagctatggtgctaaaaagccataagcaccacgggtgagcctctgaactgcaggctctcactgggctgcaggcttcttgggggaaagttcacctttgaacccccaaagactgtctcagaaagaggcccagtgaaggccactccatgtgtgtcctgctggatccaacaggctttccctatcacctctttactcctggaaacatcacctgagtgaagccccgcccccttcttcagccattccacacaggtgaggctgggtgcaggctggggacatctgccagtcgctttactctgccccttcatccctgtgtcctctcagcctagccttagcattctcttcctcagtcgctgggttttttgtctttgtggccatccccacccttctaaccttccttcttggtcttctccacacactcccatcccaaacaccccaattctcctctctgctatcacttttagaaggagctatgcttcctcccggtccttcctactttcatttcaggaaacatcgtcatgccagtctcgaagaagctacctgatttcccctggcttggaacctgctgtgaggagcatggctgtgtctgagggtgagccttggctccagcatcacagcagtaattctagacataaattctcataacaccagttctgagctgtgctaccccggatgaccccccaacctgcgtaaatacccagctagccactcatctataagagagagtcacagtgcctcagcgaaacgtggagtaacaactagttactagtgctttgtgtgggggaggggagggagaatatgttcatgttcatatgtctgtcgtgcacatgtatgcaatggcatgcagaagccagaggttgactttgagtgtcttccttgactgctctccaccttcttttctgagacagggtctcttatggaatctggacctcatgatttggataggccactgagctccagaatcgttgtcgtcatctccccaccacacacgcacacgcacacgcacacgcacacgcacacacacacgcctctgcctctccagcaccaagattacagctgcacacgacttcacctaggttttacctgggtgctggggaagtgaactcaggtcttcagctcgcatgcaggcacctgacaactgagccaactccccagccctttcctttcttatctctggtgcaagcacctcagcagcttcgccaacatgacacaatgctagcacggctcatgtgaccacctcagcttcatggaagacaatcatgaagctggaaatgtgacagctgtacagctgtattgaacagctgttgtcctcagatctgtggagaacagtgaccatgtgtttctctgcagtgtgaggctctgaggatttgcagagcctgctacctagggtgacaagtattgaagacaccatggcttcacaaactgataagacagtttataactgttctgagaaaggtccaaggagtcaggacacaccctactctggattcagtttgtactatctgactggaaatgccaaacaccatcagacatcatcagataaatgagctgttttccaatagtctgtgtgaatgcaggcccttctctggcaggaaccctccaaaccacacagaaactccaaagtcgggggtggggctgtcttactgggtgttcactttacatgactacagcctgtataatgcatatgttgtgaacatgccatagacttccagttctatctttagtggggggaaatacaaaaggcaaattctatctgtgatggacagctaacatttttagtaactattttatattgtatttgctaattttgtgtatgtgagggaatgtataccacggcatgtatgtgtaggttggaggacaatttgcaggaatccataattctctccctgggtcctgggaacaaactcgggttgtcaggttcagagtcacctttaccagctggtctaccttgccaagcccttaatatctattttaggcaaagagataactacaacacagtgggacttgctgtaagcatccttgcttaggccagcccctacttaggtcagctttcaaactggcccatgtgtgtagctcgaggccagccacatttcaatcacacccagagtgaagcctcagggctctgtgggggagctgtggcaagagcagaggcagaagcctagttcccctggaaaaccacttaccaaaagctatcattggatgcaggagacagcgaccttctcatctggaggagtctcagtggggaagaatattcaaagaacaggaagtggagcctgcttttcgggaagtaaggcacaagagaaggctctgggggcagcttctctggcttcagggatgacctggggcaaagcattggccaagtcccacttcccagaattcagccagagacactagctttgtttgccaggagtcctgactgttttcagaagcaatctgtttcatccttctgacagatgcctacaggctctgcaaaccaagcctccgaagccagtgttctgggctgtttcagagaagcaagcctcagaagatacacacctgtataggcaggccagcctctggggttccggctctatctaccttttgggaggatgcagcagagaaaccccaccagggtggatggctggcgtttagcagactcctgccagcctgtggtttctctacatctttatgtatttggattcccaatttgcaactcacatagacttcctctatttaaaactcttgaatttcccaaaatactctctctgctgatatagagtgttcctctcaaagtgtctatcaagcagcaaggtcaaggaaaaggagctaactggattcttcctgtctctctgtgtctgtgtctgtctgtctgtctgtctgtctgtctgtctgtctgtctgtctgtctctctctctctctctctctctctctctctgtgtgtgtgtgtgtgtgtgtgtgtgtgtgtgtgtgtgtgtgtgctgtgttatattgtgagacaaggtctcatatatccagatgagtctcagacttgccctgtagccaaggatgatcttgaatttctgattcccctgcctccattcctaaatactggtattacaggaatgtacccagggcctcaggcctctggcaactacctggactacatccccagtttgttaaccttttgccatttaagaatggttagaaaaaaatatcctgtgcgcacttaggtaaacaaaacagaatttctttaaaatcataaattttaacctttcaaaacgaagtattaactaatggaatgctgaaattaaaaatgagttctctggctatatattgtaggaggatacatgttcctcagacatgagtacataccttggcttcaatgatcactgatgtcctagcatgcacctggcctcttctgttgactaaccatattccttgctgtctaccatccccatacaccttctacatccagatctctctccttacaaactctaggcagagtcaggaagaccctaggccaatcaacgaccacacatctcctcctaggccacccaagagggtaagaatgggctgggcatttagtctgatcccctgggaccttgccacatgctcataattgtttccaaattaaagtcagcagaaggggagtgtgtgaacctctccaaggtcggagagcacagagtccctcacaaggaggtgtgctttctcaccacaatgggggcgtgtgggacaatcaacagtcaacctgtttcctcccaactgacactgaaaataatgactgcatcacctgggcactgatgttactaactacccggcatgttatgaaactcggctcaaggatcatcatgagagaagtgacagcgactgttcaaatgacaacaaacaagcagccagtgcccgtggttacggaagaacaaccaaacaggactcaaacaggttacctgcttcatcttcagcgaaggagatgatgaacttgttgtaggtgctgatcaagcccgggaaggcacaggacgcgttgcccaggcagatgtcttgcttcctccatctcttggttttcctatcttcctgcaaagccataagtcgactagatgaaaaataaaggcttatgttgtaggaatctgtgtttccacttcagagcttattttcccaccaagaatcagggatccttggatactagcaattggtcttaactgagcatggtgaggtacacctctaagaggcaggagggtcaccatgagtttgagaccattctgttatacacagtgagctgcaggtcagctaagaatagcaataccctgtctcaaaaaaataaacaaacaaacaaataatttactacttccttacccactcatgaagtccccaaagatgtagaggccattgagattgggggattcacacccacggtagacataccctccagtgaccgactttcccacatcatggccataagcatagatgggcagaatgtcatctgtcaggaccaagaaaagagagtggagatcacacccaagtggagaggtctaagggatcaaaagtgggtttcctaacgcagatgtacgctttagcttttggccatcagtaagacagacaactgaatcaattggtttggtttggtttggtttttctcaacagaccaatcacaatcccatgaaatctcctccctgacacctggctcccctcttagactctcagggcagctactggcgtgttagcttatgggaagtctcaagacatgggtggaggcagaaggatcaataagcataaagccagcctgggccatgtgagtccctacctctaaggcaggaagacaaggagggaaaagaggaggagcagcaggagcacccatcggtcttcaacttggaagcagtggaacccctaatcacccaagtgttgattctgatggaatcaacaggcttccttgtgtatgcagaataccatttcattggaatgccccacctcggagactgtttttaaagttcatgcagccatcaagtttgctccaccagtggctcttaaaatagtatacctaaaatccactcaagtaaacttctttaaagtacagttagtccctgtaccctagctcacccaaaaatgtaaatgcattatgcctggcatataaccatatgagtcgataaaaagttaaaaagttaaaaagagttttacatttatatatgtgagcatctgccatgaggacagcttacaggaattggttcaagttttcctagggttccaggatcaactcaggcaagtttggcaacaagcacctttatctactgagccatctcactggccccaaaccaatatcaattggctttatattctattccagagttggtcaacattccattccataaatcagaactagtgttccagtgatctgagcaaaggaatttgctatagagaaaagggtttcatgaaaacaaaaaggttgggcgttcctagtgctcaggaggctgaggctgggggatcacggattcagggtcagggtcagtccaggcttattcagaccctgtctccagaagcagaaacaaaaacaagccacacagcagttattcaaagttcttgtgtttgtatggtagccacagagagacagaatgataggaaagtaaccgatcctgtaacattagggagctactcgccgccccatgcagggtgtccagctggccttgaactccctatgtagcccaagctggctctgaagtcacaatcctccagcctctgcctgtagcactgggattcttggcacatccatcaaggatggacttgcaaacaagcatggccaaagtgtttctggtatcactgtctggggaggcagaggtaccaccccacaacccagcaacaagttaccatggagacaacggggggggggggtaactcaggttgtgttcccctacctctctactgcccacctagtcaactcattcagaaacacccatcggtgtctctctcacccaaggaagcattatgacagagtctcttctcataacattcaaacccttccttgccctccagccctagttccctcctttaacgatgaggtcaacttcttcaaatttgttctggcccacatcaccacagaatatccgaccacggccctggcgggtgatggggtcccctcggtccacagaacagcgccacatatttctgaccccgtaggcgtagacggcagggtgggcacctggctcagaaacaaagggattgtccgggggcacttggtatcgctggccatccacgccagccccattgacaccaatcctcagcactttccccagcagagaacttctgaaagacaagaagccggggtagaggcccaggtgagcaagaagactgcaaaggaccagaggaaacagggcggggacaacacacgatgggatgagggggtgatgcaggactggacaggacaagacatgggacatgctgagagctagaaacccagggaaaagtgacctcattggttcttttaaatctatacaagatgtttaagagttcctcatctctggctcaaggagatcttctagaaggacatggcatgaccctgcaccccacgaccctaagtaaactacagctttccttttctatcttaatgatgggtgctaatattatacatttgaaaataaataatggttttattttttccccagacagcagtgtactcaggaaaaagaacagactttttttttgagagagagagagagagagagagagactcttctaaatgagtttggctgctgggctgcactctgcttcttggtgaaatccctgaatgtggcagcattcagcagatactagcttagcctgattagtgttaatatgtcactcctacgaagagtgggagaaagggcttcctgagtgcaaaggtcagaatagcatggctgggccctgattccagtgtcccccattcatgtttacaggaggcctggtgctgatgtcatatcaactaaaacatattaaatttttcttgcctgttgcccttgaagtatgtcatgttctcaagtacaatgtgcaatctgactgaagcagtcactgtcaacacactgggcactcagtatataacatctcttattaattggcttctcatgtgtctcagggactagcacagagccagggacacactgctcaatcccaccattaagatggtggttgtcatagagggtcctgctaacatacatttaattttaaattcttttctatatagcactgtggtagttattatattaatcatttatttacttatttatttatctattgagacagggtctcactctgtacctctggctgtcctagaactcaccatgtagaccaggctggcttcagactcacagagatccaactgcctcctaagtactgggattaaaggtgtggaccactacaactggctacattaagcatttataatgttagctagaaaagtattctgtactatgtataggacagaaagtcaaaggctcctctccctggctccagaggaaggaattagatcatctaagtttgactttggcagaaagaacatggtaccagggtacactcagaagaaatggggtgcagcctccatcctgcttacttgttctgagcatttccaaacttgccaaagggatccccggcctgccctccatccccagtgaatatgtagagatagccatccaggccaaagagaagctgtccaccattgtggtttgaggctggttcatctatctccaagatgaccctggaagaaaaaaagaaaccacacattaggctttggcaaggctgaagctgcatgttcttgagactcccagaagctggttggcccaaaccaccaagatctgtaaagttagctgagcctggcttcagtctccaaagaccacgaagtaggtggccccatgtttcctggtgtgattcctttgtgaatctttttacttttattttcaggactagaggttggacctagtgcctttgcacaagccaggcaagcagtctaccactgagccacatccccggccctttgtggatctttcttcttttataccgtgacctctcgagctgaaagatggccagggtaacagccacccctctctggggtttgcctttactctctaccccaccagactccccttccttccttagaaaggcaaatggatctggtcattcttcccaattagcctgtctgtgatgggaaggagaatgaagggaagagagcagagtgatgatcttggagccagctagaactagtgtctcatctgtcctgttgagcaacgtgacacagggattgcctctgtggattgtctagtggccatgtctgtagggggctatctagatagatggttgattgacatgggagagcacagcccactgtgggcataccatccttagacaggtggtcctgggctgtaggaggaagcttgctgcgtataagccagctaccaagcagcatcctcctttgttgctgctgtgcttattgactgtggagtgagtttcctcagctggaggtaatgtggtatgggatagcaagctggcctgccttcaagttcctgcttgaggtcctgcccttccttccctcagagacagactgtgacctggaagtgtaagtcaaataaatctttccctcctctaagttgatggtcatgggacctgtcacagcaatagaatgaaactacagcatcctctaaccatgcattaatagctttatggccttgtgccatagcgcaacatgggagtgagaaatcccacactaaaggtaaaagctttgatttccagtgaccacacaattagaggccgctgttgtgtttaatatatgatctataatcactttaaaattccttttggctgacagtcctggctttgcctttgtaaacacaagcaagcatgactctaacttgcgtaggtaaggctggggctataccccataagaacacttctttctagagtcaaacagattgtcctcattcatcagtagtgattttcctcaacagttcttatgcgtattacttttttcctgcaagtgtggtggttgtttttattttccctgtaccacctgcatgcagaacaggcagatgccgtaaggggaagtcatagcccccagaactggaattacaaatggttgtgagctgctgctgggtgggtgctggcaactgaactcaggttctctgcaagagcagcaattgctcttagcccctgagccatctgttttcttaacattttaggctagtgctcacaaaccaggcccgttccttctctattgccccacgaccagatgggcatcatttgggagcacaatttcagttttcatgagattgtctcacctctctgatttggggtctgctttgttagggtcagacagagaaaccttcatctcacttatccggattttctccaccttcctcttgcccaggcatgaataataaatgtaaaacttgcgattgcggcggaatctgggatgaaaagccagccccaagaaccctctctcatcgccaatccagggcgtggtcagcaccatgctcttgaggtccaggaagggctgttccaggcgactcccatcaggcaggaagatccacaccactcctacctgctcagcaacaaagaagcgatgggtgccgtccccagcatgcaccatggccaccgggttcctcagcccattggccacctcggccaggcagagctgcaggcagcccttgtggtcctcagccaccactcccaggttgcggttgagctgactgttcctcaggacgttggggaagcaatagtcctcatcgggaaggttgaggaggtggcagaagcgagcgccatctttctcctgggactcgtggaggctgcggtcactggttagcagggagatggcagagtggcagctgtgatggaaggcggagcagtagtcagagcagaggcccgggaggttcctgagcggggtctgagggttctcagcatcgtagaggtgggctgcgtaaggagagcactcctggaagaggaacgggaagcttgatctcaattcaagcaagcaaaaaataaaaggaaaggggggaaaaggcgcaatggtctagtagggggtccgcgttctggaggtttgcatacaaattgctgtcaatcatttctctaggacccaagtgtctggtagagctaatggagaaaaaccctcacatattcactaccttgtgtctagcatttcaatagcttagctctttttcaaaatgtttattagcatatattaggttgtacataataatggatttcagcatgacattttacgtcatattttgtcataatgatctctcatgtccccttcccatgctcactgatctccttcttcccaaatagcaccccatctttcagtgtgtgtgtgtgtgtgtgtgtgtgtgtgtgtgtgtgtgtgagagagagagagagagagagagagagagagagagagagagaaagaaagaaagaaagaaagaaagaaagaaagaaagaaagaaagagagaagttttgttagatctgtttacaggagaatgggtgagggtttgtttacaggagctaggcaccttatttgtggttacaccactgaagaaaatgtctctccctctcagaccaaccattaactaggtataaaccctcagggggtgggatcccttgagcccctccccattccatgacaggctgatagatcctgtgcaagtcaccacagctctcaatagcttagtttttgatactgaagattatattagttgggctgtggtggtgcacagctttaatctcagcacttgggaggcagaggcaggtgaatttctgtgaatttgagaccagcctggtctacagagtgagctgcaggacagccaggactgttacacagagaaaccctgtctcaaaaagcaaaacaaaacaaaagatgatattaaatgaaggtgatgtgaacgcctgtctgagtttatgagcacagtatgtgcaggcatttgcagaggccaaaagagaccccctggaactagagctacagaaggttatgaaccaccacaggggtgctgggaactgaaccctagtcttctgcaagaacagcaaatgctctttaccactgaagcacctctccatccctggaagaatagtttttgaagacagcggtatcacatttttcagcttttccttttctcaaggtgagacaacataacacaagctccaggtctattaaacccagatacctagtgtcagtatttcacattctatgctccttcaagtttgagatatttaacaattaaaacttatataatcaaaactcccccaaagattaagatgcttagtcatttcttcatttcttccagcaaagcactatgctggaagttataggtttctctgtcaattctggcttttcagtaatgagactgccctatacaaaagtacataaggactaaatgtccaaagaagcatctgctagttgacctcctagactctaggacctagagataacagacagaggccacggagacttggcagtatatggcagttgtgtgtgtgtggcgggggggggggtgttgaatgagcatggcccctattggctcacatttttgaatactgggttcctagttggtggaactgtttaggaaggactggagttccagggggtctcttttggcctctgcaaatgcctgcacacactgtgctcataaactcagacaggcgttcacatcaccttactggaggtgtgtcactgggggtaagctttggggcatcaaaagtcccagtgctcttattctgcctcgtgactatggatcaagatgtgagctcttcattgttccattcactctgccatcatggactctaaccctctgaaactgtccaattagaagctttctttcatgggttgccttggtcatggtcttttgtcacagtgaaagtgactaagatataaggtttaaaggactaaatttggagcagtaggatagggatgattctgtcaggcaaggcacccagatcactggcagctctcaaagtggagcagcctgactggactcaccagtccctttacagagggacagcggcactcctcctgtatattagaatcccactgttctcattcacgacccctcactgggcactgtagagcaagcccttggcaaccaggcagagggaagcaaacccagagatgcagtgtctccccatgaactgtctggttcatccgaggctgcttgtcagaggagctacacgaagcaacatgacccactcttctagtgtcagctcgccccagcccatccactcttggagagtgaagggaagggagaagagggagaaaaaagagtgaaatgatgaaatacttggaaacagaagctggcagcaggaatataatcaccctggcacacttaggcagtcatttagagcttgctaagttgttttgactcatctcaggagccaaaccagtgtttctccagggggagaaacttagccccagaagagtctctgatgtatgactgtacccttgcacctctcctgtgtgcaggccccgtgagcaacaccttctcatggaattcacgcttcctggagttcagaaaaccattgtggaaacaggccagagatgacgctggcacttcactctagcgtgacataatccgaggtcctgagacttgaagccactgtgactccaggagggtgagggccatcaccacctgcagaatcacttcaaggtatagactgcacatggtggggggcggggaatggccatcgaatacacacaaataaggttatatcattcttcaagtcaaaaaaaaacaagggaacagctcaatgcggctttctgaatcagagggggcatgggaaggaagggaggctttcagtagaggcagcccagcctctggagctgaggagatggctctgttactgaagtgcttacttgcatttggatcccagcctggtgcttgtgtctgtaaccccagcactggaccagagaggatagctggagctcactggctagccaccctgcctgaatcaggcacttaattttacaagagaccctgacccaaaaaaggtagaggtgacagaggaagacacctgacattggtgcacacacaccacacatgcttttctatgagttagatctccgggaacagctaaggaatgagagcacagccccagggcaatgccaccgaggtggctgtcctctgagtctgactgcactatgatgcctgcctgggacgtctgtgcccatgcataaagctagggaggccagtattcttgggaacagtggtcatagtggaaaagaagccctgggagacaggcatgtaacaacactagcataccctggaaggtgtcgggtcaaaggtcagcctggatgtcagtcacatcaccagagtgttttcttacatcagcttctctcatcagcaccctctccccacgggtgtgtgtgtgtgtgtgtgtgtgcgcgcgcacacacacacacactcctagcctgtaccgtcttgttttcaagctcagctcacctaagttgatggctcccaagtgtggactttggctactggtgagcccggggaggatgagtcattacctcccagcaacttgaggctgtctccatccagctcaggggttccgaaggcaagaccccactccctgccaccagcacgatcacaacagaagtcccctttgcaaagcccccacgctggcaggtgccaccactccctcccttatgtgacccataaatgccacaggaatgtcgtgcctggctttctggtcccatcacaggcaggatgaagcagctgcactgaggactccatcaaaacatctcagccttctgctgcctgggggaaaaacctcagagaggactcaggggaaccagtgtgcaccctgtctccagttctccagggaggcgcctggcaggaacatcctaccccaggacctgccattcagcccagcaccctaacgccagagagcagttttccaagtcggttccctctcctcctcagagaatcacatcagacccacctgacaaaggatgtctttaatgtaccctccacacagttcatggcccttcaggtcaaagaagttcatgatgtcccagtaccgggcagcgatgcggtggtccttgcgctgatcacagcagccgaaggagtcatagtcagagcaaaactccaggtggagaggaggacggaagggtggtccataatccaagcactgggggtgtccctgcagcaggcccacccaccccaacaatgtgagacccagtagaacatgccgagagagagccatggggccggacgaccagcaacagcaggctagttgctttcccagcatttggaccttgggaattctctgctgccgccttcctgcctgcccagtctgcccaatcccccccctccttcccctcccaatttctcttccttctttctctccctcacatcctgccccaagttcactgaggtggctcctcagtcctttctctggtctggtggctaagcatacctagtgacatcagtgagaggtgtccttacctgtcagttccgtccaaaagcaatattggagcaagtctcaatattagtgccaagtgcttagggcccatgggcacttagtcaaaagtgtgagggggccaatgactgaggtgcagtgattccccaagctgcacagaattccggccatgttgggagcaggccaggaaattcccacttgtttacggtttctctgcaggctgagcagcacatcacacattagagagccccagaggtggactctgtaaggcaagcgcccaggctgctgcagtgcagaggggcacagaggacgacgggtgtgggtctggggacatgtcatgcaggctgtctggtgtgtgcttagatgggaggaaatttcgtgaatcttgcatttccccaaaagaaaaacacaggcagtatagggagggtgtctcagtcacttcactctgctgcaacaatcggcacagactggaacatggcttggttggtagagtgcttgcctagcaagcaaaaggccctgggtttgagttccagcacctcacaaatcaggctgtgtataactgccatgttgattgggtctcacacacgttgaacacaccctaccaccaatctgtaccccttagcttctgtagtttagatattgatcctctaaaatgcatacatggaaaaccttctcgaacgccccctgccccgcccagcttgtggcaccattgggatgtgctggaacctttggagacatgacctcataggaagaatcaggtcctgaggtggtgtccttggcagtatttgagaccccaccttgccccttgctgtttcccagatgccctggggtaagcagctttactctgccacattccgcacacaccactgcccaagtacagtgcagaactatgggttgaaaccatgggttcagaaaagcctttcctctgatgatcctagacgtttttatggtaatggagaagctggctggctcagcagcccaaagcctgactcaatactaacacactgacgggtttcagcacaaacttgtcccagagaacacaaagaccaggaagcacagaacacagactttccttatttttgccagatccatggtggctctgattttattacatggtgggggagtggggagcccatggtatgtgtgggaatcagaggacaactcaggctgttgggcatggtggcaggcacctttacctgctaagccacccacaagccctaactgctttagaagcattcttactccatgtacatgtcatcagtatttaagactgttttgctacatatgtctctgccaaccaataagccttttttttttttttttaagactatataaccatggctagcctggaactctctatgtagaccacactggcctcaaatttacagtgatgcctcccaagtgccaggattaaaagcatgtgccactatacccattaaataacagttccaggagtacagctcagtgcttggctgtgaatctctgcttctgtttccatcagctactggatgaaggctctatgatggcatttaaggtagtcatcaatctcattataggagaaggacatttaagggagcctctccactattgcttagattcttatttggggtcatccttgtggattcctggagatttctctagtgccagattcctctttaaacctataatgtctccctctattaaggtatctcttttcttgctctccttccaattcgatcttctgagctgaactcctggaatccagttgtagagcgggaggagtgatgagcaaaggggtcaagaccatgctggggaaacccacagaaacagctgacctgagcaagtgggagctcacagaccccagtctgacagctaaggaacaagcacaggaccgaacaaggccccctaaatgtgggtatcagttgggaggactgtggggcctctggcagtggaaccagtatttattcctagtgcacgataggactttgggagcccattccctatggagggatactgtctcagcttagatacacaggggagggcgtaggtcctgccccaaatgatgtgacagactttgatgatcccatgggaggcctcaccctccctgaggagtgggtggggggcatgggatgacaggagggagagggaactgggattaatatgcaaaataagattgtttttaatttaaataagattacaaaaacagagaacagttagttctttaatggatgaccatggaaccctaaactcagaccccaaacccagagggacaggtccatgcagatatttagttcctgaactgagcctccttccaacgtttcctgtgattccagcccactggaactgtcagaaaccttttgacatgtccatccctgctgtgcttctaaagcggacagcccaaacaatgctcctactgactgcaggaggacattaagaccataagcctagatacagccaagtctctggattttaaaagctccacaatatttaagatacaaacaaaacccataaaaccaagaagtgggcagtcagggtgactgtcaacagcacaccttatttcacctgtcagctcactggcagagctgaacccaggctgtcatacatgctgtcaaacacaccatcactaagtcaaatgcacggcctctgcttctgaaggcataggctggagtctgagtcactggtgactgtggagtttccacagggctgtttactcaaaggtcagtgcttgcctcttaggattactgcgtgtgctcagagatgaccgtccgtgatggtaagatttctttattcaggaaaacaccaaagcaaaacgcaggccagagcgagctcacaggaaccaagctagcgtggccagagagaagggacacgggtctccacgtgcagcccttaagaaccttcctttacgtcaacccagcttcccttcaccccacccttatgggcaatcccgggtccacctggcacctgtccgggttgccattgggcggggctagggtgtctccctacacttgccattgctatggaagccttggatgggagcagtaacccttggccccatgtcggccagtgaacacagttaccatggcctcctaagcacctgggtctgggtgaggggagtgcatctcccatcctggagacgagtttcttgatctccggattagcatttatatcttgatctttgttctttggccacaaaaacccaggggattttcctgttgaggcaaatgtccttgcagagtttagaaagcaaagacttccactggacaccctgacacaagcttctgattaatgtcacatttcagagaaaattacacaatgcaacgtcattttcaacagatcctcagggtcaactccataaataagtattactgtatacaaggtgctgtgcaggaaaaggaacactgataaataagacagatgtttccaatgtatcctgagaaactgagtgtggcggcagatacctgtatcaagtacctggaaagctgaggcaggaggattaccagtttgaggctaacatggactgtacaggaggatggaggaggagtgtggtagtgtgaaagaaaatggtccccaaggggtgtggccttgttgaggaagtgtgtcactgtgggggtgggctttgagatctcctttgcaaaagctatcacaagcgttcagtctacttcctgttgcctgcgtatcaatatatagcagctacctctccagcaccatgtctacctgcacgctgctgtgacctgctataatggacggaatctctgaactgtaagcgagcccccacaattaaacattttcctttgaaagagttgctgtggtcatggtgtctcttcacagcaacagaaaccctaactaaggcagggaaagcataaaacagggcccaataatggaaggcagattatattaatagagagaggggacagcaccatggaggactcacaggaaggaattgtgacatcagacctgtgaacatcttaggctggagggggtctaatagagaactggcagaaaagaacagagtgttaggtaaactcggggattacatcatggctgaaccattagaagcagactgagcttaagaaccatctggagccaggtgttggtggcacacacctttaatcccagcactcgggaggcagaggcaggcggatctctgtgagttcgaggccagcctggtctccagagtgagtgtcaggataggctccaaagctacacagagaaaccctgtctcgaaaccccccgcaaaaaagaaccatctggacctatctgtcagaagcatgtagcactcctctttgaaacacacattttgtaaaaatactgtgttagtttgcctgaactgccgtacaaagtacacacactgaaagattctcatgagaagatttattgcctctcagttctgatggccctgaggtcatggtgtcagcagggccatttcttccgagggcttgaggagaatcagttccaggtgtctcttccagcttgggggttcacaagccatcttctgcagctatagcttagtagtgctgtgctaccccaaatgctgccttcatgctcacacgccatttttcctgtgtgcatgcctgtgttcacttgtccttttcttaggagaacacagccatttggataaaggcccactacaatgacctgattttatgaatgaagtcatctcctgagctacagttgtcctgtacctttaggtctctccgcagtctactttcagccatgctcctctcctgaagtctgcatacagacagatgtacctgatgacagaacgcagctcctgcatgcgctctatgcaccagtctgcagagcgtcttcatctcacacctcatccctcctgatcttggacacacatcccattaccagcatgtagacaagcctgtggggtcagagaggttcagtgaggtacctaagaatcccactacccaccagaggtcaaacggcaataaaatccagtattctgaattacagctcagacttcattccatgattccaaactcagcaatcatttttgattgttcttcatatcaaaaaaacttttatcatttgcagccagctactgaaggcacactaattggagagtttatctgtgaattccaggtacaatcatggtgggagctgtgaatgaactggcatgaagtcattattctccaagttcaaggccaactctctctgaagacactttccatatcttctgtgggtattctcattcagcagcctatcactgctttttaaaatgttactatctattaccccttactaagaaaacccaaatgccaggccccatggcacccaatgaatggctaccattctcacattctccactgttacagaacacagggactgtaccatcagattgtatgtgctgggatgtaaaacccaccaaggcctttctgactccatggtactctggggttgttttgggagggaagatttatatacaatcatctgacctggaacagtcaggatatataaggcaaatgaatacaaaaacgaaaataacctgattttaaaaaccagcaaaaccctaaggagatgcttttcaagggaagacattgaatgactcacagtgcattatagatgctctcggtggagtcactgttgatgggggaggtccttctgtgtatgtgtttgtcttattggttgataaataaagtactattggccaataggagagcaagatgggtggggctaggagtcaagaagaattctgggaaatgtaggaaagagaagtctggtgatccaggcagaaagtgacatagcaggcagacctaaaataatttccacaggtattaagtcacagtgctctaactgaacatgcactaagaaaattctagaaaaatgagatgttgtatcatatacatgtaacaactgaggcagagaattgtgggttcaaggccagccatgcctagaaaggcaggcctcatttaacaaacagaaacaaaacaaaaacagtaaaggtttgtgtagaaaccaagaaccacagctccgcacctccctttcatggtcccagaaaatttcgggatacacaaaccctcacttaaaatttcaggagtgatgtcctactcatcttggcctgtgctctgagctttgtcagggcatttattcctacagttcctacaatttgcttacaaagaactaccagacaatccaaccaccaacttggtttacaagtggtgctatgaaacacactctggtctcatttgttcattatgaagttatctgccaccacatatacaaaatactactgagataaagattattagcaaaccataatttgcccaattttactgcacatgatttaagactggtagggctataagtcaatggagaaatgtgagctttgtcacacatttcctggaacccaaatactagtcacttcaacagtaattgcacaagaggcacaatcattttgaagaagcatttaccagcaccacaatacactacagagcccagcttatgttcctggaacatgtcattggcctctggtcaagctgtcctcgaaggcttactttgtagctgctctcattaacaagagaaaaggaggggggacatacaacttccaaagcatatcctacatcaccgtgcccctttaagctaatccacaaccttttctaccattctgactcaaatccgtcctccgaagtcaaaggttcctctctgaagggtcacttgtcccacctgctctactaaaaccaagagagaaagaagtcctttcctcagcctctccttacttcaacagacctacttctcttcttcatggcagaaaatgtaacataggtcagttagaatctaaaagtgatgcattcactactgatgcaatacactactgtgtatttagtacacaggcaggtcatctgcaaaaagcaaccatacgagagccatgttctcccactaaacacccttttctgtttaaaaaacacaaacatttcttcctcagctttctggatgaaataaagtaagaatcatccttttaaaatgtacatgtaacattacaaaaaagaaaaatataatatatacacttacaaacagcaaaggctatgagattattttcactataattgagaggaaaatgagatttaataggggcttgagatagctcagctcttccagaggacccagcttcaattcccaccatccatatagcagctcacaagtgtctgtaactccacttccaggggatctgacaccctcacacagatatatatacaggcaaaacaccaatgaacataaaataaaaataaataaattacaaggaggactctaagagagatatacatggtctccaggagaaggggaaagggacaagatctcctgagcaaattgggagcatggggggaggggacaggaagaatgagaaggggagaagaggaggggtgaggaagacctgagggagcaggaagattgagtccgggaaagaatagaggagagcaagataagagataccataatagagggagccattataggtttaaagagaaatcaggcactagggaaatgtctggagatctacaaggatgacaccaattaacaatctaagcaacaggggagaggctaccttaaatgccctcctctgataattagattgataactaacttatatgccatcctatagccttcatccagcagctgataaaagcagaagcagacaaccacagccaaacactgaactgaactggaatccatttgcagagaaggaggagtgataagtaaaggggtcaagaccaggctggtgaaatccacagaaacagctgacctgaacaagggggagcttttggccccagactgatagctgggaaaccagcatgggactgatccagaccctatgaatgtgggtgtcagttgaggaggcctctgaaatctttggggcttcttgtagtacttatccctagcataggaatggacttgagagcccattccacacagagggatactccctgagcctagacacacttgggaggccctaggccctatcccaaaggatatgacacactctgaagacccctctatggaaggcctcaccctccctgggaagcagaaagggtatgggataggtagggtgttagtgtgtgtgttgggggggaggagggactgggattgacatgtaaaataaccttgtttccaatttaaattaaaaaatggagaaaaaatttaacacaattaaagggctgggaaaatagctcagagacatgagttgagcccagtacccacaaaagaagccgtgcatagggctgacaggatgattcaatggataagatcatttgtcattctcacaaccacagttcagagaactagatggtggaaggaaagaaccaactcctcctgtaagttattctccaccatactcattccaagtcatctgcacataagtacacagacatgaatgaatgaatgaatgaatgaatgaatgaattcaaaaataaaaatcttagcatggtagtccgcaattataatcccagaactaataagagtccctggggcacactagccagccaacctaatagatgagccctaggtctcagtgagagacctgtctcaaagcaaggctcctgaggaatgacacagctgacatgtatacacacacttaaaataatttaaacctccttaaaacatcaaacacacacaatcaataaccattgagccaacacactgtagtgacagttgtaaaacaacttacaatctaggtgcaaacacctggatttacaatactatattttttgacacacttcttcatccgcttaattttcttcttcaaggtttcatgatcttgttttacaatataccgaaaatatctacaacctaaaaaataaaacaataaaaaagttttaatatttattaattaagtatactttaccatttttaaaattttgcttcagtcctagaagactagtgattatgaaagtagattcatttatatcacatataccaatgttgttctcccactaaacaaacacttttttctgtttaaaaaacaaaaacattcccttctcagacttctggctaaaatcaagtgtgagaatcgccctttaaaaacacacagtttaacagcaccctgtataagcttcactaatgaaagcgagtgctacctgcgaaggcatatctcacccataattaaaacaaacacttcaactccttttctacccttcctaagtcccagacatggtgatacgcatattatatacacatttattaagggagccttccaaaagctaatttatcctaacccagcttccctctcaatgccggcttgtcaatcagctacagtggcatctctcacagtaagaaagttctctgtagaaagcaggaatgtggaggattagaataaacaattatagattagaagttatcaaacatggctccttctagccttctagccagagtggatggagatgacactctgaccaaggtgcctggtatacctgctcttcagtctcacaatgcaaagatgacacttgtcaagtgtttcagagaagtcaatttctaaaagaaaaatgtaagcttgatatgatgcaatttgtctacctagacagctacccacccaccctgaactcacgcagttctagggactgaacccaaggccctgcacacgctggacacatgttctatcactgagccttataaccctaccatcttttacttttgatttgaagcatttatttttgtttttacttatgtatgctggtgtgcacatcacatatttatgggtgcctacagaggccagaagagagtgtagttcaggcagttgttggccacccaatgtgggtgctgagaacctaacttggcttctttgtgagaagagcaaacattgttaaccactgagccatctcttcagtacctgccacaggcctcttttttctttttgttttaagaagggtaccatggagttacctatctatactggacttgaagttactgtataacccaggtaggctttgaacttggaattgtcctatttgaacctcccaagtggctgggattactggcctgtaccaccagacctacctgtgattatttatattaaatcatatattaaaacaatcataaatcatatgaaaaattatttttattatatcctcagctgacaaacatctatctttcctaagaaaatactaggttatacaccataactacagaacccacctaccatcctcagagacagcatgctagtggtggggcctatagtgcccatagtgttactaaaataatctgtggtgtttcggtttgcatataattcctggcctcaaaagatcctcccaccacagcctcctaagtatctggaaataaggcactaatttatattcataaactactttatagtaaaagttaaatacaaccagatctctgcttttacctatacagaaaaccagatagaatttcaccctgtcctaacaccaacaactgcataaacctgaagagagcttaaggtggaaggcaatgggttgctaactataaggaaagatccctccaaagagaaaaagggcctgccttgctttacacacagcatgggaggaacaacagttgtcacaccctttctcagacaaagcagaagctgaccaagatggactgtgaaggtgtaacagtggtggccagagtgagaagcaaactcagctcaatgccagaacataccctgatggaagaaaggtgcccattctcaagaaaaaaacatgtctcataattctagaatacttgggaattcatagagccctccaggagatgatctcttggtatttataagtctgttagcaaataaggaaagagccatgtttacaatgaacatttcacacagaaggccaccaaatgtcattgcttgatctaagtgacaggaagactggaaactgtcccttcagactctgctccgatgcagtaccctgagccgtctgtacggtctgtgctcagagaccaggaagtgatgaggcactgcaggcaagcccatttctgtgccatcaccagtgtgtgactagaaatggcatttttcacctctgttctcattaatcctccttttctcataaaatcaatcttttcctaatcttagtgactacaagaaacacaccaattctcattccacaagagacgccctcttagcactgcacatggtgtagcctcagggtcccactaggcattgacacaaaccacaaccaggcgaactctgggagctcatgagcacagggttcccggtgctcactgaagcactcctttcatacttttggatgtacttcctggcagttttatttcagtgtgttccaccactcatgtttcagtggtgcaaagcaggtaagcattttactggccaaaatatcccataataaaagaccaatttcctctttttagaagacttgctgttaataggtggtattctttcttttggggtggtgtgggggtggaggggatgtgcattccttacaggacaggagaggctaatgaataactgaggtcaactaagagcatctttgtgctttctgtgacactgtccataagctcagtaaacctgcacaggaaggcccaagagtctgaacagtgcattttatgtcccgaactcatgccagggcatagaagccaaccgcacagttcacaggaccccgaataagctcttatcacgatcctgctgagggctcacactctcagtcctgtcatttctcaagcacctaaaacccctaggcatcatactggacaagatgaacaaaccggcccactttctagcttcagacttggccaatactacatccaaataaacagaacaaaaccacagaccttttcctaaaaggattcccactacaaaagctttctcacacgccaagtcagcatctgccttccagtcgctctttgcccagaagaagctgaagtgaaaggtgggccaccagcttcttctagacatccactcttcttcaacccataccagatggcctctgcaaggaaacacgggaaaagggcaagtgagtgaggggaagctgtcagcaggagctcaatgtgggaggtctctaagacagcacgggacaagccccgactacagaagcatggaggcaagctcacgttcactcttcttggtctccacatcccatgcccacctcagagcccatgccctacagcatgaacaccaagttaaagccctggactgaaatctcagaccctccatctccaatcacaggctcctcactcagaatatacatgagcagagccacgccttttctcacacccagaatatacatgagcagagccacgtcttttctcacacccagaatgtggcactcacaatatgcttggcaagtgcagcatcagacactttaaaatgcagggctgatagcgggtgagggtggcgcacgcctttaatcccagcactcgggaggcagaggcaggtggatctctgtgagttcgagaccagcctggtctacaagagctagttccaggacagcctccaaagccacagggaaaccctgtctcaaaaaaccaaaaaaaggaaaaaaaaaaaaatgcagggctgattttgctaacacaaaatacatgcacaggatttctaatttcaattaggcttatgattttgtatttcacagcttctgatactcagaaaagaaagagctaagtagcccataaaggaaatgtgaaaacatcacgttaaaaactttaaaagcaaccactaaaatgtggcaattattacttatgataagccagtgaaaaatactgtttcttactcactccattaatgtctgcttcagacactttgccaagtatttccaagcagttatgttcttagtgcatccggcaaaatcaaggaattcaaataacacgctcaggcccaacttctggtgttcttctgtgtctgcaacagtcacaaaagcctaagcttacagacggtactggagaagcgcgctaagaagagacaccaagttaatgaagtattgttaactacaggccttctaattggttaaatgtttaaaacaattcattatgctcagtgtcctatgatgaccataagatggtgagcctcttctgcagttagacccctctaaataccgcctaccctatttggcatttttggtatatttaggttgggaccttcagactttgtagtatctgtcttaagcaaggacttctaaggcagacgttctttactatactgcacaacagccctcaaagggttaacagaggtaaattgtagaagtgaaaggcattctgtccccctacttccgaagtctctccattaggaccagacaacaagcattttaagatttgtgagctgcagatgtggagtctccattgcagctacaggttctacagtcataaagcaaaagcaaccacaagcattccaggagggagtggggtacaagggaatttggcttgtgaaaacaggtgatgagtagatgcggcccctggattgttgatggctggtcctccatctagtctatatgcacaaataactataaaacacacttttacctgattttctaagcaacgtgtggaattccaacattagtggatgggatggcacaatctcatgcaaaatctgaaagagaaaatagtcctgtaatttacacactatacagacatttctcaaattctagcttactttcacataaaattcttactagctaacacgctctcagcaaatgaattaagaatttaaaaagtactttgctttgatctagtttcaacctgaatataagaaggtattctctgaaaaggtacttcagaaaacacaattcagaagacgattgagtgggtgtagcgctcactatgcaagcatgaggacttgagtttagatcctcagcaccacacaaacaacaaggtgtagcatgttgcatgcacctgcaaccccagccctgggggaaaggggagggtcctggaagttcactgtcctcaaaagctagtctattggtgagctatagtttgagtgtgagaccctgtttttgtttttgtttgctttttttttttttttttaaaaaaaaagggtggaggggctagagatggctcagttaagagcacatggtagctcacaaacatctgtaataccagttgcaggaggatccaacactcttttctgacctccagaagcactgcatgtatgcgatgtaccgacatgcaaaacacccatacacgtaaaataaaggaaaaaaactaaaatagggtggagaacaccacaggaagacacctaacagactcctagcctccacacgcacgtgtgcagggaggctgaaatatgcccacataatacacatgtggactggggacattgcttagtcaatgaaatgtttgcacaaggatctcattctgatcccaagaaccctggcacatctggagtctcagcagtggagaagcagagacagatgggtccctggggcttgctgaccagccagcctagaccagttggtgaattacaggggggaaccttcataaaacaagatggtccaggtatggtggactttaattccaacacccggaaggtagaggacagtgaatctctgttagtttaaggccaggctggtccacacagagaattccaggccagcccggactacacaggcactatctcaacaacaacaaaacatttaaggaaacaagcaagcaaaatagagatagctcttaaaaaaggacacctgaggttgacctctggcttgtttctcttcctctccctctccctctccctctctctctctctccctctccctctaattcatctatattctccctccctaatcctctcaaaattcttgctaacaacatggcaaatttactggaagaaacagattgagtaaacaggctttttgtatcgtacacatatttattctgcttgacatactttaaaaacttaaatgatgtggcttttagaaagaatcaaagaagaaattacaaagccaggtatggtggcctaggcttgcaatcccaacattctggaagtagaggcaggagattaggacctcaaacccagaccaggctgcaaagtttgaagcaagtctcttaactgcatgacacccaactctcaagacaacaaaatcaaagaactcacatagaaaataccatgtttctcagaaaatatgacagaatatttacataaaacaaaaactcaaagggcagagaaagcaattttagaaaatatactcaaaaacacacttaaaagcatgtaaatattttaaacagttcttttgtaaaaataaagagaaacttaaagattttatttaagaatacaaagaactatatagtgcatatatatgactatggaacaaacagaactttaagtaacatcttattatttcaaaacagttattaaaattgaatttgagccaacaagatgactctatgggtaaaggtgcttgctgccaaggctggcaatctgagtttgaacccgggggtcagagtgcagaaagagaacaactcccacaagttgtcatctgacctccataagtgcttggtaacacacagacacaaacacctggacacagaaaaaataaattaaatttaaaaagtgaactcatgcctgtccttttctgaagaaagggaggaagagtggatgtgtggggagggactggtaggagagggagaagggaaactgcatttgggatataatacatgagaaggaaaaagaaagtgaattcatacagtctgtgtcctgggatactttatatttccaacagaaagcaaattttgtcagtttctcttaatggttttataaaaggtcaacgaagcaaagtcagaagtaaatactgacacaccaataacagaagttattaaaacttggttcctacagtcatggtttttcatgatttatctatgaatgctgcaactcacagtactatattgaaatacatgtactgttatggcaaacaagtatgttctcatgaagttgaacacactcacctacctaccacccagatcatgtaacatcaccaggtgagttttaggaagctctcagccacttgttcttcaagccgcctgtctgcttctgcttgcttgtgtgccattcccccctcttcctggactccacccactcaccagtctctcactgagccttgacaaaggcctccctgcgccttccaccctgtcacttgcgctttcccctgtacgtgagacactggctatgacaaactttagactatcgactacattcttgacaaacatgaactattttggaaaaaatttatcaaaatttatcaaaaataatagatcagaaattaaaatatttcagaaaaaagaaaaaagacctagagagacatgccatgttctatggaagcctcaatttcattaagatatcaattcttggggctgaaaacaatggctcagttaagagcttgccactctttcagatgaccagaattcagttctcatgccacgccaggtgacacacaagggcctgtaactccaaacccataggatccaatgccctcttctggacaccttgggcacatgcactcatgtgcacagccccacacatgcatacataattaaaacaaaaacaaaaaatgtgaaaggtgccagttctttcaaaaattggtctacagactcaaaattcctcaaagacttttgtttctatgacaacatactgacttttaaatgtatataaaaagtgaaagaaccaagaaaagtcagaaaacttttaaaaatggatagatttatataattttcatgtgattccaagacttcctcagttacagtgatcatgctattagtgcaatgacagaatatatatcatcagggccaacctacctaaaatggagaaaagacaagacttttcaatgagtagtgctacactagccaagcaggcccccacctcccccaaaaaaagccttgacacttacacctcacagtacacatacaaaaaaaaaaaaacccatcatagacctttagcataaaaccattcagtacttctagagaaatgaagcataaaagagaatcttcattagtttagaaggccaaaaatttctcagataaaaagcactaagccataaaggaaactgtgaaatctggagatcattgctctttgaaagacactgctaagaaatataatattatgtgtagtcatatataatacatgtaatctagagaggcatgaatacaaacatactgtggtggtttgaaagaaaatggctcccaaagagagtggcactattatgttggaggaagtgtgtcactgtgggagcggactttgaggtctcttttgctcaggcttccctcagttggactttcagtcaacttcctgttacctgcaagatgtaggactctcagctatttctccagcatatctgcctgcatgtcaccctgctccccttcaggataaaggatttaacctctgaaaccataagcaagccagcccaatttctcttcaggaactggaggtttttcctaaagcccacagagggagcagtgttctctactgaccacagtacaccattcatgcatggctgtttactttctgttgttttatcttatggtgttgggcatcaacccaggcccatgcatgtgctagtccagtgctctttcactgagctacatccccagcctgctgctattttctacaggtgcataacataagatacgactttgtattcaaacactggggaaatttctatacctttagaacacttatcagttttgctcttggtgccttctctctcttgagaaattcatataagtatatgtgggcattcgggtttgaggggaacttttcatcatacgcataattggtgagtatctctcgggctccatctcgatcctcacagaattctagcatctgtatataaaaaagtatatcttagattaactctgtaaaataattccatgaaaagaagatataagcttactgctaagaatgcaacaacaacaacaacaaaaaaaaatcacaaaggtgacaaatactgtgtaatagacaagagtaacaccaattctgcttttctagcattcctacatctacaaaacaggatcaaagggcttcatgtggctcattttttccttgaatttgttactgggaaatgtagacgccaacgtaagaccgctcctacaagaaacacaagtcctcaaagtagagaacactaatgaccaagtgtgattcaactatctcagcacctaattataacttcagccctaaggagtacatgataattacagttcctatcgctgaagtaattcacagatgaactagattaccttctgacaacaaatagccactctagcagtcaaattttctccaagcagcacccaagccctcggttcttctgcaaggactctgagatagtgggatagctagcttaataaacttgctaaaagccattgttttcctcaccccctatgttgtaattctggttgttttttcccacttcccttctacaagcaaccaaatccttagccattatcctgtttttacattatgttcaataataaaaatgcagacttgccagtcacaattacatcactatacacataggtatctggccatgacaggcatatttactttctttcatcaatgccaccaaaaacttcacagaaacaactaaaagaaggaaggatttagctaggtggtgatggcacatgcctttaatcccagcactcaaaggcagaggcaagcagatctgagttcaacaccaacctggtctacagagccagttccaggacagccaggaccacacaaagaaaccttgttttgtggggggaggaggaagaggagggaagatttatctgaatatctagttcagaggattagactccatcgagacagagaagacatggctgaaggcttagtctatgaaaacatgtagcaacaacttatcacaggacactggccagaaagaaggtagaagcaggaccctccttagtgtcccatttcacataaaggtcccccaatctcacaaagctaatgaccaccaagcactcaagcatattagtctttacaggacatttcacattcaaactattaaaaagttagccaggggtaaaactaaacaagacaaatttacatagcaagtaataaattatttagaccaaaagagagaaagcctccttctgatcacaggacaaaaatcaaactaacacaatcttgtacttttgttcttgagacagagttggctcactatatacctcaggctggcctcacactggcagcacttctgcctcagccttctcagtgctgggacaacaagtgcatcactaccccggcccatgaagagtgactcacctccacataactcttcacgaaaggatcccaaaccccaggagtttttagcagtgcacagatgcttgtagacgtcctgcagctctggttgcccgagtttccagtttctgaggtgtaagcataatcatccttatctgctcaaacataagagattcacacatcattcagccataagcataacaagagtggactgctacaaatcttgtatcatacacaaaaaaagtacacctcaaaatggattaaacatctaaatataaggactaaaacagtaagactcttataatgggcatctttagagatctgaagtctgcaaccatttctgccagtggccatgtcagaagaggagcagcaggtgacaactgacttcaggagtttggttcaccagaaggcaaggcccaagggcttcaactacagaatgtcttgcttttgctgtgccttttaaatgttcttccaatgccattcttctctggtatctggcatggtgtaaatgggtgtgggggagggatccccactgtgtttaatgtaaagtgattatctcatagaaataccctgttctactgggcatttttacctgtggattattatgaagatgatttcctcttaagctgtactgtttaattgaagtaatgattttataaaataatagtgttactttaaatagaattttgatgactaagggtctttaacaactatagtaagggactgtgacagaggtcaggttagtgggaaaatagggtatagtgttgccccgtccctgataaagcaggggctgcagaggatggaaaataggaacaaggaagtgtcacacagttaagacttgtgagttttacttgaggagccgtatagactatggtttaggttaaagattaaggaaaccctctgagtcgtaggacttaggctagctcaagttcttttaatcttgatgttgggaaatgtgttcccgggttttgtatgcatcatagcttaaaaaaaaaaaaaaagtttaaataatgacttcatgtaacgaaaaaaaaaaatacaaacaaacaaaaaaacaagaattgcatgcagtagtagcacatgcctttattctcagcaccctcgaggcagaggcaggaagatctctctgagttcaaggtcagcctggtctacaagagctagttctagtacagccagggctacacagagaaaccctgtcttgaaacacccccaccctccccccaaaaaattggaccggattctgaaatatgaaaagtgagactagtaccagtacacagtttccatttgtttgcttgaatttttgagtcaggctcttaaaacataactcatgctgacctcaaactcaagacagtctcagcctcccaagagcaaggctttttctactacatctggatgagctcagcggtctatgtgagccacgctgccctgccatccatttcgagtaagaaagctgactgtgccaactcaccaatctctgacagttccgttttctttttggaccaagtgtgatattgtaaaagccctttgtaggcctgaacaaggttgattaacacttcctgagaggacgacttttcaccgtatctccatgtctctgcatcactgagatttctgtttgcatcctcaagctttccatgatgtataagatacaatgcatgttgtaaggaaatctgcaccaataaaaacacccactgtcactgaagtcaaaactatcagtcagaaaactcatgaaagatataacatatgctggcctagtcctgaaaacgatgcattagaaccatcaaagaaaagtgaaagcttgactgggaggtggcagtgcacgtcttaaatcccagcacttgggagtcagaggcaggtgaatctctgtgagttccaggccagcatggtctacagagtgagttccaggacatgcaggaatacacagagaaaccctgtcttaaaaaacaaatgaaaaaagctaggcggtggtggagcactcctttaatcccagcactcaggaggcagaggcaggcagatctctgtgagttccagaccaccctggtctacaagagctagttccaggacagcctctaaagccacagagaaaccctgtctcgaaaaacaacaacaacaacaaaacaaatgaaaggagagagggagaggaaggaagttagaaagaaagggagggagggaaagttcagatagtggtatagtccatactctgtcattacacattttatgctttgcaggctgtatggtttctgtcatgtttattccacttaaggtcaagttcttatataactttacagtgtttataaacttcctaaagaatggtgtttagttaggagtatatagagaaagggctataatcctgtggtatggtctcagtctcttttgcaaagaactattattaaagatgggaattcggagaaaaggatctatccaaacagcagaaacgttacagcttttgagcatgtttaagttcctactttttcaggttcccccaccccccaaaatgccagctcagctcaagtaagttcagcaaacctgtggaggttggctgtgtccacagggaggtgcagcctgatttctgaaggactgggcttggcagcagagacagatgagaaggtggctgaaaaccagaagtgagcagtcctcacatggtagcattctccccttctcttttactcacaggtctacctactttccatgattttctatctcagcatcgatacaggcaattaaaacacacacacactgaaaatgcactgaaactgcattctcacctttaaataattcaggacaccaatatttttcattcggtcagcaaagttattaaaagtctccacattgcttttgggatgataaaatagaatttcacttccaagcttccaaatgacctatcaaagcagaaattatagcaaaataatgaatccttatcttatccagtttcttcctacaagattttgttcatttttccccgactataacacttaaaagcaacttacacttctccatggaggaccccccccccccgtcggactttactgcacttcacctagcacagcagcaccctttactaggtaaaatcctcacgtcctgaaattctggtgtactgatgatgcttctgttgctgtgataaagaccgtgaccacagggatcaggaagaagcgtgtatttaggctcacagttgcagagactactctatgatgacagcacaaaggcatggtggtgggagcaagaagctcacatcttgaatggcaagcatgaagcagaaagcaacctagaaaatgtgtgacttcaaaactgaaagtccacccccagtgacagacatacttcttccagtaaacccccacaaccgtgctcccagcaggaaccagtatccaaatgccagagcctctgagggcgttctcattcaagccaccacaccaggtaagaatagcagtgccatcattaaattagtgctctttaaacggcatcattaggatgcacattaaatataaacttaaaaatcagtatgaaatggattcctatggggctcaatctcatcttcaaccctccaagagcagacagcagacatgcccacactccctgaactttcaaccatgagtgaatgtgctatgtaggatgtcaatctaagaatatttatcagaaaaaaaaaaaaaaactgtcatgaaatatatgttctcaggaatttgagctctgcttttctcagggagcaaatgtctatttctctgtcaacctaaagtagattaataaaatcaggtatctttaaaaaaacagaaaaagttgcctgtgcctccccgctgctggggttacaggtgtgcacctctacacctggcttttatacaacaggacaaggatggctatgagagtgaaggcactaaaagaggccctcaggaagatggcaatagctgaagaaagacccttacaagtaaaggggatcaaagtgaaagcacatgcctgccctgctccattaaaagcaagggcagtaaggctaggaaagaaaaaccaagttagagctgggaccagataggcagagcaggagagtgagctcatcctgagggaagtccacagcagttagaccatggctggcactccagggaaatggaaagccattagtgttctcataatcaaccatggtttggagaagccccatctgcatcattagtcaaaagagaaatgcaaatcataacacaaggagattcagacaaaagatggctgtaaacctgagtctgaggctagcatggtctccagatcaaggctgtctcaaatagatggatagatggatggatgaaatgaaaagatcaataaggatgtgaaaaaattacaacattaaatattgctggtagaaggccgggcattggtggcacatgcctttaatcccagcacttgggaggcagaagctggcggatctctgtgagttcgagaccagcctggtctacaagagctagttccaggacagcctccaaagccacagagaaaccctatcttgaaaaaccaaaaaaaaagaagaagaaatataaagtggaaaagccactttggtaaggtccttggtaaaaccttaagagattaaaaacagtgttattatataacctacaattctactcatcagtatataccaaagagaaattaaagcaagcaccataaaaaacacatacatgaatgttgagagaaaccactgactaatggataaataaaatgaggtattccattcaacagaatactgacagtcaaaggaatggataagccaggtatggtagtggcatgcctatcatcacccaagtagtcaggaagcagaggcaggagaaacaaaaggctactgtgggtagagctagaagcaaaactcccagcacccactgcatctccagcagactcccactgggtctacctcgggggcattctgtctcttgtaggtgtctgaatcttccagggtctgtaagtaactgtgcatatactctgcagcttgctgccactgatgcttcagcagggcttcttggataaaacttaaacaagcacttgtcgtctgagcaaaatccctcttcttcttccctccagtcactgtaacaacaacagaagactaattattcaactgagtccagttcagctaatcaaaagactcagtcaacacaagttttaacaagggcagcaagtattaatgacccagcctaccccagaatcaagcccactaactgaaaacaaaccctgccatacactagtagttttagtgctctcctgacctatgatggaatgttgacaggtagtcctgggcagatcttatgcaagcagccactactactgtacattcagtcctcttcccaaactcctgaaattagcttacatagaaactcaaaggagaatttaaaaaccgagctggccacagggtcacatgacttatctgagcactacacagactcaggcaggattgtgaggccaaagactgaactacataaggaaattctgtctcaaaataaaatctaatcctaatattagatatccttgtgctaccatgctccctatagcttttaaaactggttgttcctttactaagtaatttggatagaaccttccaaaggaacaggccccagtattttaatggataaaagtcaccaatgctgccaggcgttggtggtacacacctttaatcccagcactcgggaggtagaggcaggaggatctctttgagttcgaggccaacctggtctccagagcaagtgccaggacaggctccaaagctacacagagaaaccctgtctcgaaaaaccaaaaaaaaaaaaaaaaaaaaagtcaccaatgaagtcctaatgaagtaagtttccagtaatttagttgtaaagtctataaagtactgacaatctccttgttaacagtacgtgaagttagttacaatattacaaatgagacaggttttcccttctaacagatcctgtttggccagcagtctttcttttttgtttctgttttgctcctggtttcctgggactcacatggcccaggctgacctccagctcactatgtagccaggtatgacctgggactctctctgcctggtctcacacatgctggagttacaggtatgcacagccatccctgactctgggccctcatcttccagcaggactctcttatttaagcacgacaaagaccaacaggaagcatgggaaggtacttttctaacagtctgggcaggtgtggagagatggctcagaggttcagatcatgtgctgagattcagttcccagcacccatgtcaagcagctcacaatcacctatagctcttgatcaggggatttggcaccctcttctggcctccatgggcattgcactcacacccacatatacgtatacacacagtaagaaataaaaatcttagggactggaaagatggctcaatgacaaagatggcacttgctgctcttgcagaagaccaggtttagttcccaaagccacatagcaacacacatctgtcagtaactccagggcattcaacactttcttttaacctctgttggtaccacatacatagtacacacacatacatacatactcttaccacataaaggccaaaataaattttacacagtaaagaaaaaaaaaaaaaaaaaaaaagaagaggcagctacagaggctgtagctcagtcgcagtacaagctatgtgcaaggccctggatttatctcagcatgtccaaaacaatccaaaagaacacaaaatcaatgtgtatatctgtgccataatacactccttcctaaaactgatcacctagagaactacccctgtgttccaggcctatcgtcagtcaaaacatacataatacttgcaggcaaagataaggcttataagtgaacgattcttagcattgccctttgcaagttagatggtttccaaaatctgtcttgtcaaaaccacggagacactagtgactattttttcccttgaactcagagatctgagagcctctgcctcccaagaggtaggtgtcattttttaacaagatctccatcgttcaattacactagtcagctagctcagaaaggcagtgaaatcatccagctgcccttcctctccgccaacatcccagaagccccctttccctacactttctgtgtccttctgactccctcttattctctatgtttttaaataatcctatgttcacttcctgtcaactggttgcttgctccacctcttgacctacagttgactttatttaaatctgtttacaatattcaagcagaaagctcttggattaaagatgtgtgctagggctgagccacaccacaagtagaaacaggtttttccaacctcggggttcacagtgtgatcatgatcaaatatcctgcaaaaggttaggattaaaggcatgtgccaccataacctgctttgacactagtaacattaagaatgtgtatatatatgtgtgtgtgtatgtagccatatatactttctgcaaaaaagcagtagcttttctactcatctgttactacttaaaaatcagtaacaatatattacatttctacatgatttagatttcactagatctattttaaaagtaacccaattgcatttaaaaatccatcatgtgaaaatttttcaattgcaactattaaactcacaaaacaatctatatgacaccttaagactgtcaagtcaggtttataagtactgcaagacagtacacagaacatatttcataggggacatctaagttagaaacatgataaagactacagtccctcagcagggcatggtggtgcatgactatcactccagcaatcagatgaaaaaggcaggaggattgctgcaagtttgaggccaacctgctctgtgtagcaaattccaggctagtcaaggctgatcaacaagaccctgtcctgaggaggcctggagggggaagactatagcatagacctaattaatgcacactacaaacaccaggatctgcagccttcaatactcaaagaggttgtgaaaccagcagtactggaattatctgaaagctaattagaaacagagaaaagaaagagagaaagaaggagaggagagaaagatgggaaggaaagggatggagcctctcatgcctcagctggctctctgaagcaatcactgcatttagtaagagctactaagctgcttagatcacaattccaggcaaccagcccacaaaactggcacagtatctgttcaaatagcctttatccacctaagagaagactgctctcaggccaagttccatctacctctttatgtttagaagtacaggacttgagatcagacagacctgatttgcttccttatatcattacttaagagtttaatttcgccacagagaaacctgggggagggggggcgagtttaatttctttgcaattcagtgtcctcacatttactgaggactaaattactgggaatataaaactaaatgaatttttctttttaaatgggagctaaattcttggagccaagaaatgcatggagagtaataagaaaagtgcaggtttaagtgtatttaaaggtctgacccatgcagcattccaccacggcttcttcatatagtcctatagacgttaacccactaaaagcattgtctgcatctacattagattaaaaatgaagaaagatgccttttaaacctattacatcaatgctataaggaaccatttccattaaactcaacagaaatttccttaacatttcctatgtatgtgctcctcaatgagaccacattttcttcatctgtacgtccccaatattctgccaatgccaaatacaagtgctcagtaaagagaactatattcatatatataaatttatacatgtgtagttcataatatagactgtgtattattttttaaaaagggccaggccatggtggtgcacgcctttaatcccagcactcaggaggcagaggcaggcagatctctgtgagttcgagaccagcctggtctacaagagctagttccaggacagcctccaaagccacagagaaaccctgtgttaaaaaaccaaaagaataaaataaaatttaaaaaaaaaagctacttcttctaatttcctttttgtctccagctgtaagaaagaaaagggaaacccccatctaatcttattacaatattaggcaccctgattcacacctgtaaccctagcacctggagactaaggcaagaacaaccaggagttctaaaccagcctgagctacatgaagtgagttccaggcaagccagggataaacagcaagaccctgtctaacaacaataacaacaacagaaattaagggggaggaaaaatgacctggcttggtcattcactttgtagctgtgttcagtctcgacacttagttgcattaaagtgaaagtgctgtcccacttacctacagtctctattcgctcctgaagccacgggaaatgcattcctggattagagaacacagaggtttctctcttgccatcctctgccaaagcaagctttgtcaattcttcatcgaaatcgctcatatctattccaaactgagagtatcagttagcgtcagtacacgttaacccacaggcacctgacttgagctgaaaagcaatcttttcttgtagcaaagtcacctgagcagcagggcccattgtatctgacagttcttttcaaggaaacactgaatctgtttaagtcaacaacagcctaaactcaagtcacattttttaaaaatagaagtctggggactagagacggctcagcagtgaagagcacttgctgcttttctagaggacctgtgctggttcccagcacccatgttcatgatcttctggaaccctagtcccagggcatacaaccaccttcacaacagaacataggcacacacatgcaggcacacacccacacatgtaaaataaaaagtttctaaaatccataaaacataatactgcaaagctctgaaccaagaacatacaaaaatgagacatccttaattacaaagtaaaaaagctaaagctacataaagaaactgaagaatacataacacaatatagcaagtacagtaacagcaggagctagtatttactgggacttaactacatacttagactataaaatatctaatttaatcgcagcagcaaccctattctctcccacttagtaatgaaaactgtaggacttgctgggtggtggtggcagaggaaggaaggaaggaaggaaggaaggaaggaaggaaggaaggaaggaaggaaggctgaaggacttatacaaaatacgtaacatgaccaaaaggagtgaagacaggagtctagcaaatgcagagcacacagactagctggtgtgaccaaaaaaatggctaggaggtgggcagggggccatggcaaataaatgactctacaaaagcagccatatgccactgaccttggattgaactgtcgaaagggtgcagaccccagttctgagtacctatccggtattgaagcttcgggtactgcgatttagaattccaccaaacgcccctcctttctgcaatcctacggcgccaccctggctccggacaccttcagactggtccagggtgagtgctctggcgctgctggtgtgtgtgtgtgtgtgtgtgtgtgtgttttccgcgacgctggagacgggcccgggtctcgagcctgctgactggcagcagcgtctccctgcggcgcgggaggctgagggtgcgtggttagtcaccgcgccgcggggagggcgcagggccagccccggggtgctgctccacctcacctgggggcggccggccccgcgagcgcgcactaagccttgtaggaaagccgactccaccgtggggcgccaaagcctgaagcgacgcctcaattcagtgaggtcggccccacggacgctgcggacgcctgacgcgagccccgagtcctcagactggcggcggcggcgccgccacggtaacctaaacctcccggcccgcaactgacgctcccagaaccgcggggcgctcacacagctctccccggcgccacgctcgcccgatcgcacgccgcgggctgtcagggaaaaccctctccggaagtcctcagcgagcgcttcctgtgagcctgcgcataaccagccggccggcgttcgggtagcgcgctgcgtagccccgccctccgtcgggcgtggcctggggggagagcccaagagcctcgccagaagaggcttgacccggaagtgggtgttagcttccgccttcgccttggtttggccctgattacaccttgatctgtgccagccagaaactggaaggttcccatcgcaagaccggagtgtggccagggggtgcattgccgattctgattgctgctctgaaagttattttcattacagtttttagcatcttgctgccttcacagttggagcaagagtccgtgtttcgcttatcaacgtggagtgttctggcgatcggcctggagtccgctctcaagagggacattggcagccgtgtattgattatggaggtggatagtggaattgcagtgtcgtatgagaagggggacgctgcgagggaagatgaccctgaagactggcctgagatgtttggaaaaatactctgtgaaggactgatcggttaatgggcagattattacacagatgtgaacaagcattaatgagtaaaagctaaagggaggcaaccttaaagtcattgggaaaaaaacaatagttcatagttaaggctgcataaatgatgcaatggattcctcctaaactccgaatttactgcttgaaaataagagtctgagttccatggaaattagccggtctatcattactccttgcccttaagcctgttttggtttggttttgttagaaccccggaaaacctcaggcctccagggtctcagcccaggactgtggtcaccctaatcaccaggcagattcgaaagcttgctgcaaactgcacaaggctttattgtttaacgagctcggatagcaaagacagctcgaagagtctgcatagagatcttatagggcagcaataaggggagtgtctaggggtacacacaggctcaggattggtgtgcctccaggcttggagggcttgccctgtgttgattggccaactggttgttatggcccataggccctcccagggtggttgccatgctcttcaagccattgctgtgcacttgtccataaagcacacccagagccgtaaagcatagcgccaccagctaacttctgattggttccttgccacaggcaggcatctgactttctagtgactaggacaaggtcatggcaagcacgtgttactgtcatgtctgccgaaatggggagctggtcccttcagtttgtttgggtatttttttggtgggggggaggtcaagacagggtttctctgtgtagctttggagcctgtcctggaactagatcttgtagaccaggctagtcttggattcacagagacccaccttcctctgcctccagaatcctgggactaaagatgtgctccaccaccgcctgccttaaccctgctatttttgttgttgctgtttttgttttgctttattttggattttctgagacgaagtctctatatagcccgagctattctggaacacactatgtagttaaggctgacctagaactcaatgatcaatagatctcatagagttctgcctttgtctcccaagtgctggggttaagggtatatgccacccatgccttgcctttaaacctgtactttaactacaggcaaagctaaattaaataatgatgtcacacactaagtgattagtttgccatcgggaagcttgttcatcaaaatgaatcaactgattttgtttgttcatgctcataaaaataggcaaaaaagtcatccatggtcgaacacacctttaatcctagcacttaggaagcagggacaggtggatctcttagtttgaagcaagcctggtctacagagtgagttccaggacacatccagaactacaaaaaaaccctattgtaggggatgctgtagccatgcctacttaggggctggctacagcatcacctacaattccccttttgctacagcatccctacaccctgtctcaaaaaggggggggggtgttgttctgatgtcaaagtttgacattaggagataaaagtgaggaaatccattgtcttcatattgtttacacactacttctcttacccacagtaaatttttttttttttttttttggttttttgaggcagggtttctctgtggctttggagactgtcctggaactagctcttgcagactaggctggtctcaaactcacagagatctgcctgcctctgcctcccgagtgctgggattaaaggcgtgcggcaccaatgcccggccccccacagtacaattctgagtgagaatgtgttgagaaggagctttctagactcaaacctagaagaatggatgtaacaaaggagaggaaaatatcctcacagttgctttcctccaaagaagcaacttaatcatggtaatgaactacattttctaaaaccttttgaggtgtcttggaaaatattattcccgtgaaccttttctatagaaaaaaagctaaacataatcaagtaattgaaaaacaaacaacactgcatcataatagtttgggttaaaagagaatgtggcaaaaatagaagtatataaaacaaagccaacttgcatgataggtatagagaaaactttatccaactctagcttccctgaactacatgggcaaggatcctacactaggctgagacctggggagagactgctctaaaaggcacaagttcactccatccccctcacccccccccccgccttatttggtacccccaagccaccatggaaagaagcccaggctagccttctagacagagagaatggctgaaaaaaagagctcctggcatattagcgtaataaagaacacactagcatcactcagcacctcagttctaggcacacgaggaagttaaaaaggtggtcatctctgattttagagcagttattggctgaaaaccaccacatgagtggttccagttcaacaataggtgtagcagaatcgagctaaaccctacacaaactcccatttcaaatggtctgataaaatggcggttatctttagataacaagttttggtgatttgggctaaataaccataacgaaagtggtactatagcaattctagcccagggctttaagatgctttacacttttggcttttagtgcaaaggaggactccagtcaacaagtttaagattcatgactgaataatttcactgagacacaggtctatttcaatcagtttagtcacggacaacaaaactaccaggcaatgaaatgaagctattttaacccaacacatagttgaaggaattgatgtgattgaccccagccaagactagaagaccattcgactaagtccagacaaagcagaatagggagaaataaatgatggtgttaagccactaaatatattacatagcgtagaataagtgttatctgtttccacatggtgagtcagccttaattcttgagctctctttagcatagctagtagtgaaatgtctttgtttttcatttcagctttgaagaatatttatactggaccagcaggggggtttgttttgttttgattttggttttgttttgggtttttgtttgtttgttttttgtcgttgttgtatttggtatcagctctttaaatcttcccattgacttttagtctcattgagactaaactttaactgtttttactgatcggcagtgtgtctgtttgtctttggttgttttcatccccccctcacttgattatttataggtagtagaatactgatctatgtgtgaatcttttcattatatgttatatgtactgagtctcctagactcatcagttttttgtttgttaattggtaattttttttttttttggttttttgagacagggtttctctgtggatttggaggctgtcctggaacttgtagctcttgtagaccaggctggtctcgaactcacagagatcctctgcctctgcctctggagtgctggatttaaaggcgtgtgccaccaacacctggccggtaattttttaaaccagttttgcctcaaatttctgttcaattatgtccctgctttcaaacactttaagtatttcttttttgggggcgggggttgagacagggttgctctgtggctttggaggctgtcctggaacttgcacttgtagacaaggttggtctcaaactcacagattctctgcctcttcctcccaagagctgggattaaaggtgtgcgccaccaatgcccagccactttaagtatttctaattatatatttgtaatgacaatagtattaagagattcatttttttctttctgatcattagatctgatacttcctattggtctattttaaaattgactcttggttagttggcagtgtagaatcttctgataagcctatttcattatttttttcacttaaaatgctgcttattatttgaatctctttttttttcaaaagaaaggtttcacttatatgttgataacaccctatttgttcattataattatactttccactgagtctttggagtaatcccccccccccccccgacacaaagtctcactgtgtagctctggctgtcctggaactcaccaatgcccggcccactgtgtactcttaacagctgagccatctctccagtccctagagttaattgtaatcatcattttctagtgctatggtcacatttaaatatgactaatctgatttggggatgttttcttttttcaagactgggtttctctgtgtaacagagctctggctgtcctgtaactaattctgtagaccaggtaggccttgccctgagagatctgcttgcctctgcatcctgagtgctaagattatttataggcatgtgccaccacctcctggcaagatatcctttgttcttataccctgatccacatgaggacaagttgtagaaaaactacattaacctattggtggctcagagtgcataatccttggaaagttattccatattgactttttaaatttcttttttgagataggctcacactgtgtagccttagctggcctacatctgctggtgtagaactcacagagatctacctgcctctgcctctgcctctgcctctgcctcattgctgagattagaagtgtgccaccacacccagcctcatttccatccattgtcaccatagcacaatcatcaacagagagagaggacaagccgatctcctgaagaagaaggcacctttaatgccttgccctgacaatatgctgcctggagatttcctccagggtaaaatattccttcctagagagaggcttgagagacccagaaagtaatgcaggagaatggagaggccctgaggagactttccaacctagcaagatgccggcaaggtgtgtggagagctccagggctgcagcttagcaagttcgtccatgctgggaatgacttttcagtggtgtagctgcctgtgtgtcacccatgctctggagaggaacctcagtaggctcactggttcactgagtatgattgctgcttcagtctgtcactgggtcccgacctgaggttgtgtctctgtctggggtaaacatctgtgtcatggctccccagggcaagtctcacacagcagtaactccatacctctccttatgttatccttatagcattctttacctgcgtccaggatgttgtacctggatgtcattctggctttcctagctctgaacttaacctactccctgatctgtcaggtcatttaggtagctaaaagctagaaaattaaagccacaccgaagtctgaggaacttgaaaaaagaaacaaaaacctctgtgcttactcaagcaatattaccttggaggttgtattcagggaaatttcaagcctagaagctgttacaaggcagacataatagtgtagctggagcaacaaaatgaggcattgttggagctcactgtgggttttggtttttgttttcaagcaatattgctttgtagaccaggctggcctcccaccctggcctcccaagtgctgagattccaggtgtgtgcccccaagaccaacacacatgccatataaagaactttcctaagcctgtggtgcttgaactgagacagcagaggacagaagattccttcaaggttaaggtgaacaagctggtctacatggcaaaagaaaaaggatgggaaatgaagggagggatggagggagggatggctggagggagggagggaaagtgggaattgcctcatgataggacagagatctcattaaaaaattaccatacaaaattctacagtgttctgttcctcaggaaaacaaatatgaggaccagtgcgatagtttcagcaggtaaaacacaccccacaaaaacctaataacctgagtttgatccctggaacccttggtggaaggagagaaccaactctcaaaagctagtgtgtgtgtgtgtgtgtgtgtgtgtacatacaacaataatcaagtcatttttaaaaaagaaataaaacctgaaacttacatggaccaggtaaagtgatctagtggtgtctgttacactagggacatcgtccatctgccaaagctgaaaactctagaaaatagtgtattaacttatattttactttatccttcttcaagaaatttccatatttccctgtattgatcacaccttcattaaatcaatgtttagttacaggaatgggctcttctgtagtttaaagtttatctaaatagaaaaataaagattctactttttaatcttgggttatagttgaaaataatgatgggaataaaatggcaaatcagtttttatatagacactaagcatatctaattactgaggtaaaatgaagttttgtgagaaaaaacttaacctttaaaattttttatgtacaacttctaaagatttaaattatatttctaagtggtaattaatgagattctggggattcagaaacaagggaagtagctgttcacatccacagcctctcttgctgtctgtcattcatcccttcatgtattcggcaccatttcacattccgtggggcctgggataggagtgggcttcacactagtcactgaaagctctcacttccctcttcacagtcacttattgttcagtcttcatataagggcatttatggtcctatttataattgtggtgcaggcaccagatgaaatgcaaacacctccagatatttgttttattcctttgtctgttatcagtcacttgtggttgtatactaccctaaaaatctattttctttgggttggggaaatggctcagcagttaagagcacaaactgattttgtgtttttgtttttgttttgttttgttttgtttttcgagatagggtttccctgtgactttggaggctgtcctggaactagctcttgtagaccaggctggtctcgaactcacagagatctgcctgcctctgcctcccgagtgctgggattaaaggcgtgagccaccaacgcccggcaacaaactgattttgtagagaaccggagttcagttcccagtacccacatcaggtggctcacaactccctatcactccagctccgagggagccaatgccctagactcaccttcacaggcgcctgtattcaggagcacatactcacacagagagacaaacatacacagaattaaaaaataatcctttttaacacatgttttcttttccttgggtcttggggtctcttccacaaagtacctttgatcttcccagcaagcttgggaggacatttcctggtctctgaatgagaacattttctggggtaacatcgtttaaacatatttccttcatcaagtcactgtttgccaagactggttgcagcatcaccaactctactggctgtagaagtttgggatttcaccgattagttatttaatcaacactaataggtagtccttttatttgcttcttaaaaatcactgtaaatttctaaccttggccacaattttataaagaatctgagactttgggaggcagaggcaggcagatctctgtgagttcaaggccagcctggtctacagagcgagtgccaggataggctccaaagccacagtgaaaccctgtcttgaaaaaccaaaagaaaaaaaaaagaatctgagacttaaaagaattaatggctcagaatggttaactgattcctagttcaggccctcagctttctagtctgggctttcatggctgtctagaccagaccttgggctgtctagtccagaccttgggctgtctagtccaggccttgggctgtctagtccaggccttgggctgtctagtccaggccttgggctgtctagtccagaccttgggctgtctagtccaggccttgggctgtctagtccaggccttgggctgtctagtccaggccttgggctgtctagtccaggccttgggctgtctagaccagaccttgggctgtctagtccagaccttgggctgtctagtccaggccttgggctgtctagtccaggccttgggctgtctagtccaggccttgggctgtctagtccaggccttgggctgtctagtccaggccttgggctgtctagtccaggccttcactggctacatgtcctgcccctgctgctgctgctctgccagggaagcaagcaattcatatctgaaaatgaaaatgaagtggacaaagccaggtagtctgccctgtggagactgaggtgcacaggccacaccccgaaatctgttctgcatttgttgcaaaacactaaatatttgacttcaaggaaaatggtgccaaggtaaattcagcccaaccggaaacaggaacccatattagtggcaatggcaggtgtttgagtttctttctttgtatggtagaaagtagaataatatttgtcagagctgaacaaatagtacaggctggcaggaaatgtggccttgcatttgactcactcccagtagaaagttcacagtgacaagactttcttagctgtggggagggagttagcccaactggccatgcccaacacaaacccgcattctctgttactctgagcaggaagttctcttatatccgcttctgtcattggatccctttacttaaaaccccatagctctctctgtttcactaagtctaaattcttgtgttggtttcaaagtcattcatgatcggtcccctcctcaccacccagtttgtcttcggtcactttgcacacacgctcgctgtagttgggtgacgtctccttactttcctttaagcacattgctttctgcttttaatcccagcacttgggaggcagaagcagggggatctctgtgagttctgggtcagcgtggtctacagagtgggttcaatcccagccagggctatgtagagaaaccctgtctccaaataaatgtgtgagtgagtttgtgcgcatgtgtgcaggtgcctgtggaggccagaacagagtgttggggaccttgcagctaaagtacaggcagttgtgagtcactcaacatgggttgctaggaactgaattcaggttctcctcgagagcaatgtgcactcctaaatgctaagccgcttctccagccctgtgtggtgcttttggctgttagattagtcaatagtgtagaccagtcctgttgtctaagaaaatagcttttagtctgttaaccgaaaagcattctgatagactaaagagcattctgcaagactctacctttgagtatttctgaggcaaactgtgaaagcgcttccacgtcagggggtgtattcttcagacctcggataacgtttttttttaactaagagaacatgcaggaggagtgagatgtgcactggtggggtgtcaccatacactgggctcatgtgagtttccacagccgcctctttcagcgtcactatcctgcagatagtcactgcagacctgttcccatcatgcatttctctcctgcctgccctctcttagtctgtgccctgtttgttctactacactttattctcagtaggttcttgatcctcatgagacctaaattaaattttcatgggatagtttatttaatggagtttcatcccctgtgttgtgtctctctgctgcagattaagaataagtacttaaaaaaaaaaaacaaaaaaacaggcattggtggcacacgactttaatcccagctctcaggaatcagaggcaggtggatctctgtgagttcgaggccagcatggtctccagagcgagtgccaggataggctccaaagctacacagagaaaccctgtctcacaaaaccaaaaaaaaaagtcatatatgtgtatatatatgccatgtatatatgtatatacatatatgtgtgtatatgtatatatatgtgtgtgtatatatatgtatgtatatatgtatatatatatatatatatatatatatatatatataatttgtgtgtgtatgtgtatgtatgtatatcaggaaattatcaaaaaatgtgagtgccttactgaaagcttaaaaataaacaaaaaacccaaactaaaacccaaggattgtaatacaaagaacctgtgatctgtaggtcagggaggaggtcactgtaagcaggaaaggaatgaaacataaaggcacaggacttaaagcctggcctgggcaggaaggtggcctttggggccagcagatggatcattccaggtctcagaatggcaacagacatagaagggtgggcaaattaacagaaacaacccaacgccccttcagtgaaggtctgttcagtcagttctcacaccaaagtctctttgctttgtcattctgaattgtgctaaccgaagactaggccttgagaatgagtccagggtctctgcagagaggtgtaagacagcgtgtgctgcacttactgtaaaagaggctgttctctttgacactaatgactatacattctcctgctaggaagaggtgcgaacctttcccctgggcaacaaagtggcttatttccatttcagtttatttttggccaaacctaaactcacatttttgtcagtggccatgtcagaggaactacagatagcaatggagcttatggaatacagcccagtggatagcaaaactatgctgggtgcatcctggagcagcaaagctccaagaggatccttcccagaatgcccttggcttcttctgtgcttcctcctgcttgctgctgccctttctgctgtatttggcatggtgtgattactacatagaaggatcccactgtatctggtgtagtgtgatggtttcttgggaaattcccactcatcactgagcaatttacttgaagatcataatgaagatgattttttaaaattgttttttgagacagagtttctctgtgtaacagctgtggctgtcctggaacttgttttgtagatcaggctggccttgaaatcacagagatctgcctgcttctgcctcctgagtgctaggattaaagacatgtgccaccactgcccggctatgacaatgatttttgtaagagcaattatgattagttagattatgatttaattggacgttttgagttagcctaaaagatacaggtggataacacagttcataaagatgattagggacatggtttaggttattctgccaattgctccaataagacagacaaaagaaataaaaggcaaaaacagtctagaagttaccttcccctttgttagatgatgggagatgtccttctgtatgttgtgaatatatgtttctcttattggttgatgaataaatgctgattggccaatagccagtcttggctccatttgaagaccaaattcctgcctcatatggtcctgcagctgtttagtcccaaataaacacacagaggcttatattaattataaactgtttggctgatggctcaagcttcatattggatagctctctcttaattagtaacccatttctattaaactatgtattgccacaaggctgtggcttacccaaaatgctctagcatgttactcctttggtggctacatggtgtctctctctggtgactgttccctgcctttcctcttcctagaattcttctagtctggtagccccacctatacttcctgcctggctaggctaatcagcatttattcatcaaccaatatgagaaacacatattcacagcaaacagaaagacatccccccatcatctcctcttttctgtctaaataaaaggaatgtttttaagtttaataaagataaattatatataacaaagcagttatcaagcaaggattataattacaacatttagtccatcaatatttggaaaaatttaaagaaaatattctatcatctatactatctttgtgagtctaaagttttatgtgtgacttatcttttatcataactaaggaaaccataaccattactatctgtcttcaacaccatcaaagacctcagaaggataatatataaaccctagaattgacagagacatcttgctacctggacagtcacccaaagttcctctgtaatgttggggcatccatcttcagtctatagctctcgagtgtctggcagatttctcagcaaagcaggaaatttgaaactgtaccacctgtattggcagtttgtcagtcacttttctctgtgtcctgcagaatgtctgacagactcttccatgaagcagaaaccctgcaggactgccccattctgttttggcaagttcagcagtcactttcctgttgggtcctgcatgtccagtttggacagcatgctgtcaatcagtccagacaagagcagtttcttgtccaataggccagttttgccacattgaaggcaaactccataatgagtttcttcaatgcccatcttcctctctgatgtaattgttgttgtcaggagcagttgtgtctcactgtcatgaaaaaccctaataaacattttaaatgccatattctgtaggtctttgaaaggttttgaagaaatatatccttgtatatctagaaaacctaactaacataactgttagttttgactattataggttattatctgtaatctatatttttagttatatattacattataaaatgagctatgtaaatacaatatctaaacaagagtagaaacatacatataacaaaactaaccttaaatttgtgtcaataaaccaaaatccatattaatgtaaagtattcatttctatatcgtatttccttttttttttttttacagcatacaaaaggacatcccctgtcagttagatgtgagattttcagcagatggaaaataagaacaaggaagtttcatgcattagagacccatggattctgcctgtgggaaaacaggctgatgatcaaagaaagtaattatgctcctattccaaggttaggtctgagtttcttggtcatgtaacttacagaattaattaggcccagtatgcaccttgaaaaaaaaaacaaagtaatgaaaggaaatgaaatggccctactgtgtgtggggggagataaatggctagttgaccacttgtttcaagtttctctagagtagaaacaggataggaatctgtcacaccaaaacctcacacggctgcctgccggcatcaaaggaactggctgaaatacacttagcttagttaattaattgtaaaagaatcatggctttgggaaaatcaatacaaagaaaaatgtttgtgggcttccaaggacaacctgtggtcataatgtgatttcttcctgtataaagatttgaatttctttttgaaaaatatgtaacctgtggttgtgaggttttgtctcaggggggataaaagcaaaaaataagagatgtaattgaaggaaaacatcaggaaagatggaggaggaggacaactgggaagaaggaagaagaaaacagcagggtaaaaggacggggaaagaacagagcagcagcagaaagaaaattaaaggaagaattaagctttggccctcagaaaagtcttctgtgtgtgtttgcagctccgccaatgccatgcctcctctccagtttctctgacctgctgagagttagttctctcggcagcacattctgttctatgccattttccaggagtttgattgatttattcctacattcagatctatggcctgtccctatttctgtgtgggatcccgtctttccacatccttaccaacaattgctaatgtcttcttttattatagccaccctagtaaggtggagcagggacccgttggcttctgtttcacgttttctaaagttccgtgatacacagtatcttctcatctgctcagtggccttcacatactccctaagttgtcttttatattgaactgtaaaaattgcttacagagtctagatatcagctccttaccaacctgtaagaattgcacttattttcctcgggggtagggggtggggggaaacgagtcagggttcttatgtcacctaggctggctttgaactttatatgcagccaaggctagcttttaaacacatcttgtctacacctcctgagtgctagggtataagcaaggactgcatggttggtatttccttccctctgaattgtctgtccacttccatttataatatcctttgaaacaggcgttttccagctggagagggacaccttagctatgttaacatatatttttctttggttgcttgtggttcagtgccacatctaataagctatgtctggtgtaagatttgtcctacaccttcttttattatactttagggtgatccacttgtagttagttgtggaagttcatttcaatttttatgaattaaaagatttcccctcatgtctgcaggacagttctaaggcatcagctcattttcttttggtgtctaaattgctctgttaccgttaatccatatatatatatatatatatatatatatatatatatatatatatcttattatgctattattatctgatgataataataataataataattttttgttgctattaggcatgtgttactatggagcaatccctgggcctgtatattcaaggcgagtgctttaccaatgagcacatctgtagccctcagatttgtgtttatttttattttataagtcggagtctcactgtgcagcccagactgaccttgaactcatgctcatcctgcctcagcttcctgaatactggaattgcaggtgtgcaccaccaggccttcttaatgctgacacatcaattgtatgtgattttagaaaacactgcctttgtgattgattggatttctagtagggtgtaataaatacgccttcctgttaattcatcacacccagctctgttatttgtttactcatttttattttattattattatgattggtttttttgagacagtgttcctctatgtagccctggctatcctgaaactcagagatctgcctgtctctatgtcccaagtgctgggactaaaggtgtgtgtcgccagtgccccagttctgccattttctcttcattcctatgtaatattgtgcctgctccaaaaccttgcagttttctcccttaccactggttttaagcattttgctgcacagtaattgttttatcattatttgtgagcctggggtgtgttgagctccctgagtctataagtgatcatcagctttggaacatttccctcactgtcagtgcccataaagatggctccattccatcttggctcaagggtggagagttctaaactgtcctcagtaagtcataagacctaaacatcaaaggtatggctacagtaggatgttccatcttggccttggttgtcttattctaaacaacaatagacctggtctaaggtgtggttactcctgaccctcaaggccagctaacaagaagttgaatctaaggactggttactgaatctttggagaaaagagaaagaaaagtctgttctgtatacaagataccatgttcccgtttttggttaaggtatataagtgtggtgaaaaacaaattcgtggcatttcagtaatgactgatttgccctcctgcgcttgttctgtgttttcgtcttttgctttaacatttttagctagccttttttagtccatactccccctctcaggtacgaacctcaggctgcttggctggctccgctgcagcccttcaaagacagcttcccacacctcaccatcccttcataggtgctttctgaagtctcctctctcttaggaaccttaattatctgtaccgtgggcaggtcaagttgtgggtgctggtggttcagttcttccagtcttttgtttcatgttggagagtttacatcgcatctgtagttcactatggtctgttgttgatcccattcagtataatccaccccagctgctgtctttcaactatttttctttggttagaagctgtagtcctcaatgagtagtttcattgttcataaaagacaactcctcctggccatttcagtaggaggctttctggaggctcccagacaggtgccaggacaggcttgcaatgatgcgtattaccaggctgtcttcttcttatttcagatgtatttgtctggtattctcattcacacaccagagtccccaaggtcaagagcctgctgtgtcttatatttctatgtcccttctgccacagacaacacaaatgtgcttttaactattgcacagtgaacgtcccttttgtagggttaacaaatgatgggcctaggtggtggtctatgttaagcttcaaggctaaacaatcaaatgctgggagcaacagtggtgcttatgccgcactgattacacacacactagcgggtgagctgtcactgccaccctggctgtcacctgagaagcttttttctcattatcctaaccctaactctaatatctctttaaagaaatacacacacacacacacacacacacacacacacacacacacacacgtgcatgtgtatacatttatatatataaattaaaccttcagaagcccatgagccaatgaataaaggcacatgctgccaagccagaagacattagtttggtccctgggacccatctggtagaaggctaggatagagagaactatgtcttatagtcgtcctgtgacctctacaatgcaccatcacaaaagataaataaaaaatgaataaaagatgaataaaaaataaataaaaaaccttcatgagtcaaacagtctattcttcagtaacaggaccattggccctgttgtgatagcatatttaaatcaaaatgtctcattgttgtgttactcttttttttttttttttttttttgagtcaggtttctctgtagctttgaaggttgtcctgacactcactctgtagaccaggctggcctggaactaacagagatccacttgcctctgattcctgagtgttgggattaaaggtgtgcaccaccaatgcctggctactattctttttctaccctttaaatgttattgaattctattctgtggcaatgagacgactttacagttattctgatctccataccctggtagctcacagaacaacaggaaacaggtgcagtgagagtgcagacactcactctgacagacgtgtccccacacaaccataaacacatctgcggacctgttcctggtgttgctggtgatgctgaggggaaaacactaagcaccctgtgtatgggactgggcttaagtcaactgtgtgtggtacaaggtgatccgtgcttcatctagcagttcattgctgaacacatcgtgtgttccagacatttccctaggcacctaataggaacgaacaaaacaaattagggcttggatgtaggtagctcttgttgagcatgcccaatctccaacaccacacaaataataaacattttctcactcctatggagctatttgaggttgggtctggagcagtcaaatagagaaagaaacatgaggtacatagtaaacgtgctaaagaaaataaagcaaggtgatgagcttaaccatcctgggaaggtttgtgtgtgtgtgtgtgggggggggtgctggggtggggcgggggcatcagggtgagactcctgtgtgataatgcggggttacagaggcaggatggagtaaggggtacctgaggaattattgtagggagggagaaagtgcaagcataaatgcaccaaggagggagtgggcttgctatgtttgagtttccctgacagagcaagggaaggatgccagcaaaaggacggagagactttgtggtctgtggtgaagcctttgcatgttacgtggaaatgcggagttgtgggaaggtttgaggagaggagcgagaccgcagactctatcctcacagaccgtactctggctgctgtcgagacagcagctattggtaacacgagggcatccaggtgagccatgaagccggtccggcctacagtgctggcaaggcagatggaaggagaacacgtgttagactgaatgacttcttctttgtggacagagacagggatctccgaaccttgggccgaagaccactgcccactaaccctgtccttaaagaatgccactttctaattcaccgtcccatccactattccattaaaatgagagagtgatggggccgcaaacaatgccatggagcctgaggcgcgtgtgtgccaggatcagtcgctcgctcactgtggcctgtcctgtgtgggacttggccgttcgagccgagaacggtagctggagggagtggagaagagggatggctgtttggcgtggaccagaaattggaagctgaaggagggaggagggagaacctgtagggatggcgcagagatgcggactgacgaacccggtgacgcggagggtcgtttgtgagggcgcgggaaccgaagccggcgattggctgacgggagggtcctagtgacggttgtcatggcagcggttcgggagggacgccgcggcatcctcccagtcactcagcatccggcgctgagaccccgctgacgtgtcgctcgcagcctcccgccgcccgcctcccgggcgcctcccccggctccgcccgcccctgccccccccggcaccgccgcccgggcctccgcgtcacccgcgcccgcggtggccacaacatggctgcggcgccggcgctgctgctctggctgctcctgctcgggccgcactggtgggactcgggccagccggaccccagcgccggccggcgcttctcggacctcaaagtgtgcgcagacgaggagtgcagcagtgagtgtggggcgcggggagggcgccgggcccccgggtggccgcgcgggtggcgctcccacggctcgcacccggcctagggggtcccaggcccgcggagcccacgccggcagagcgtgcccggagatcgccctggggcccctgccgtgggggccgcgcctgccacttgttgccagggtttgctctctgctgctctgacctggtttggggggcgccgcagacccagccgggtttccaggagtcaactccccgcttcccggtccccgatctccgcccgggctcccggagcgatggggtggaggcgcccccgcatcctgatcgcccggtggtgcagccagcagcgtccctacgccggcccgggtaggggttgggggtcctgggtccgtgaaagaccgagacccactcgcttagggatctgggggcgcaatcccagtgactgattgacagcggggtttctccagaaggcgccccggtgttgcctcttccacctcccggctgcactgggactagctcgcatcacctttggaaccggaggaactggagttttggtttgggataagccccgaggccaggaacgtagtatgttccgaggtctcccgttttctgcctcagtcctgtctcttgcgtagaagcttttttgccagcttccaagtaggactgcaggaaggtcaaaatctttcgctcttaaaacaggacaaggagcgcacctgtcaccacctgagaaccgcagccttctcctctatgcgcagtctcgccctggtcctaggttggaggtgggccatggagaaggttaggattagaatatagctttaatggtgataataatttccccagaggtctcaggagtcagtccagccttttccttagtcccctatgctgctgggacccattcctgcccagaataattcattagatttcaggttggtctccagctactgtgtaagtcactgtcaatgtccttcataaaccacaagcagcacatatagaaaattattcctcctaaaagtccaagatgactgcatgttagtcatttatatttcacttgactttatgaagaaaacaaattgcataattccattaaagtatttgcaccaataccattaaaggaaaggaaaggggtacctgtaatttataacacctagattctaggtcctagaggtagcccagggccagtgtaaataaacactgtaaacaaaggtggaaccaccattgtgaattttcccttacattttcctgttggctgttggcaaatggctgttgccattttgctgttgaatattgcccaatgttttctgttctttgccatcaaacactgtcccacccgagttcctcaaaactcaagaggacagtatcacaggtgctgcttcagcactgagacttgtcgttggaagagttctgggctctactataacttgagaagtggcccgtgtccagacaaatgtaaccaaacacaataggcaacgatagaagcagagcccaggtctgtgttgcctggtcagaagtgcttagtggtgagaggtgtcacgaaagatgtcacacagtgtacatgtcattcatagataataagcaatacataaagacataggctgtcctggatatattattatactttcccaagaatctaaggagggaaccagaaacagggctgttgtgatttgagtacaattcctagcctcaagttccttctgtctgactttttgctcagacccatctgaaataagatgctgatatatctgaaaataatcttaattcagctttaaaaaccaaaaccaagttacaccctccaaatctgtatgcttgtccctggaatatgtatttttaaaacatgtttgtgtactattgctcattggcttttggacaaagaacaatttccatcacttctatgtctctgccctttaatgcacagctaatatcatttggcaaaattctgcttctgggctggagaggtggctcaggggttgagaacactggcagctcttccagaggacctgggttcaattcccagcacccacatagcagctcacaactgtctgtaactccagttccaggggatctgacacccttacacagacatatatgcaggcaaaacaccaatgcacataaaaataaatcttaaaaaaatactgcttcacccaatactggttggtggtgtatgactttaatcccagcactctggaggcaaaggcaggcagatctctgtgagttcaaggccagcttggtctacaaagctagagagaaaccctgtcttgaaaaaccaaaagtcaaacaaacaaacaaatactgcttctagtggtgtggccaaaggtctgtatttatatttatttacttgagacaagatctcactatgtagccctggctggcctggaactctcaggctcttgcctgccttttcctcttcagtgctgggattgaaggcatctgccaccatgtctggccatagttctgcattttaagtgacaaaataacttctgacctagtctcatagttttatttggaacctgacatgaaatacccatcttggatttttatttctagtaaaaatgatttgagctttgctaatttgtgtgtgtatggggggttgttttgttttgtttgtttgtttttgtgtaatactgggggactgaacccaggaccatgcaagcattctactgttgagtcacatcttctgtcatcttcatactaagttacctaggctggcattgaactccctctgtactgcaatcaggccttgaggttatgatccttctacctgagcctcctgaatactggaattacaggtctacaccagaccttcttaatgctgacacatcaacgttatttgcttagaaaacattgccttgtgattgattggcttcctaatagtgtgtgataacatgccttcctttgttaattcatccagataccatgcagagacaatttagccacaaataaaattgacagtgtttactgctgcacaggggcagttgcagccttttacaggtagtgcctgttagtggttggttcaggttaattgaccccttgggggttcctaggagttctttctggctctgtggtatccccacagttagctatgtttaaaccagtcagcacctgcacctgcatggacacatccacaaaatgaagccttcatggttataaaacagcagaagttggtggggggtgctagaagattccagagggaaacaaagggttgacctgagagcagccatctgtggtggccgacccgttgtttttgacttctcagacagccagagaggaaagtacaaactccctcatctgattatagcggatgatgtgacttacagcaaccaggctctagggctttagatactcggagcatgtgaattgaaatcaactcccgaagagtgcagggcgtgtttgattattgttgcaaccagattcttatatttcctgaaaatctctaagaactggtaatgcttgcttcacatgcacaaaaccctggctttgatctctggcatgtgccagcaatctcagctctggagaggtcaagtaggaggatcaggagttctggccatccttggctaccaaaaaagtttaaggccagcttgggatacatgcaaccctgtcttaaaaaaaaaaaaaaaaaaagtgggggaggctgtgagaagtcaaatcctaatgctgccttgttttgttcttttccatctctgaatacagtgttaatgctccatggtgaagctcttgcagacttcacaggccctgactgtcgttttgtgaattttaaaaaaggcgaccatgtgtatgtttactacaaacttgcaggggcattccctgaagtttgggctggaagtgtaagtaaaaccatgaaaaacttttatttccttatttttgttgattttatagcactgcagatttaaatgctattgatggtgacttccttgactgtaaacagaagatagccctatggttttatcaggccttggggctggcacacagtaggggtgagacagccctgtggttctagcaggcctcagggctggcacacagtaggggtgagacagccctgtggttctagcaggcctcagggctggcacacagtaggggcaagacagaggtttctgaaacagaactgaactggttctggctatcgccccatagctattgaggaagctgctcatataatacaagtcaaaatggcaaagacctgtaaatcttaaaagttcattgccttaagaaagaagtatttgtggtcattagactcagtcttataagctatatgcaagatagcatttatggtgtgcaggcttaaagtttgtgtgacttttctctgttaaaaaaaaatgccaaaaaagctgaagttagggctagggtgatagccaggacctgagtttggtccccagaacctactttaaaaagccaagcttcatgggtgagcttttaacactgagtccaggaggtgctagacgggtgggtctctaagactcatacactgaccagccttacgtacttgaagagtgaaaaacacaaggtgagacgtgagtgaggcagaggcaggcaaacctctgtgattttaaggccagcctcatctagatagcctgttctgggccagcctggtctacaagtgaaaccttatctcaaaacacacacacaaaacaaacaaacaaacaaaaaacccacaaggaagacagcacttgaggaatgacagtaaggttgtcctctgactgccccatatacatccgtatgcccacacacatactcaactgcacacacacacacacacacacacacagctcttactctgtttttgtttttccttaatggcagggccattaagctgtatcccagctggccttaagcttctgatcctcctgcctcttgcctccccagtgctgagattactggtgtgccccatttgtgtaacgtttcagatcaaaccaagactttctacaccatcagcaagcattctgcagccccagccttcgctttgccccccgaagaaatcctgctttagcatccagcctggtgatctttgctggtagatatgtgcctgggtgggacgctgtttgccctgctcctgtcacagtcgttttactgctgtgcttgtcagccagctggtgtctcagctcactatcaagtcagaagccaggtgtcttatctaccttcattttgagtgtttcctaacagggcactatagcactgaattacatttactctcttagtagctcaagcacaattggccttcctgaggcagactctgtgctccccacccccaaatcaaatcagcagtactttggcagggatgcttcacagaagcaaactgagacataagaattccttctgtgagggcctgtgattctgcgagcctgtggggagggactgtagcacccgaggctgacagatggagaaggaacttcccgtttctttttcacacacctctggattcctccacttttctacctcaacctctatagcctttattcctacagaagggcaacatgtatttctgctcagtcttccctctcatttcatgaacctcaccatgtgtggaactaacaagtctccctggttttcagatgacttgttttaatatcttaattctcatcccacggtctttcttggtttcctagagtttcagggtttatctgccagtcttgtagctttccatggccgaggtcttatctaatcttcggggttttattctattactaacatgggctccagatggttcccagataaaccaagaacactgctgaatggtgatattttagaactagtgataaggcggcctttcttcttcttgtgcctctgacttgcctatccgtccatctatcagtctactttattggttgggaataggtccttgctgccttttacactgtggcagggaaggacagtttctcaaatgaaacttttattacactgcacattttacatgtcttcaactgtgcatgctgggaaaaaccagttattttctgtagatttattttacatgtaactgaaggctgagaggtaggtaagtatgtattacatcataattttatttaatcccccaaatacttctaaatgctgtttttggaaaagctaccatagcatatggtatcaattgatattatttgttgtagcagcaacatttcagaagtcttgtttgcttctgcttatttccatggttcatgagcaacgctgtcaagtgctcatgtaaatttttgccagagatcacttggaagtgtgtttctagttggctttggtttgccaagtctgagccgtacagcttgcaggcagcttctcttacacagatctctagttacttccaactgtaaggctatgtgctgatatgtgccttagagaactgttgctttaacaacactaatttccattggcacagtcatcgaagtgtcattgttagcagcaaacatctatttctcttggcctatcttgtttatgtatttcctgtcactgctaaaaccctcctttgatttcttgtaagaaattaattactatttgtctctcttccccccctttttttttcacataggttggacgaatctttggatactttccaaaagatttgatcaagatacttcacaaatatacggaagaagagctatacattccagcagatgtaagttgttctctcttacaaataggcttgtaagttcagctgtaatcaatttggtggtactggtagtgccagttaaagacagttttaggcaaggcattgcattttcccttacagctcttataaagtgtaattaactctttgaaagttggtgaatatgttttggacaggagaaaacaacccaatatttgtgtatcatattttaatttggaatcagactaactgaaaaagaacatttgaaaagcatttgtaggagactatgtaatctgataatagtttaatatactgaaaagtctcttataggaggctgtagactgatatacagggcttttgtctgggtttttgcatgtggaaaaatgtaatacattagcgaagtgtgatgatacttataaccctagtatttgggaggtggagccagcaggatcagttcaaggccagcctgaactattcaaggccttgtctcaaaagaacaaaaaagaagaaaaaaatccttgcacttagttatcaaagaggtaaataattttattttacaagcaaaaagaggtgtcccaatttgaaaattactcattgggtactaaacattttaaatagatagaaatcaaggtcagctaatcaaactctaagctgtgtacagacctgttcatacacttatgtaacacttatgccacagactgggaaaatggatgctcagggctttatgtgagtcccgtttcccgtctgcagagcacaaagccgctggtgtaggataattcagggatggggtgagaaagtggtcagtgccacagagctgtcactcttctttacagtccttgatgctctcgaggtactcacattataatcccactgggcttctctgttgacaagggctgtgcaggatgggagatgttcatccgccctgagatgtcacctgttttagattctgtcttcttgttatacttcccatgacacccttctcttgacatgaagaaaatggctcagaatcatgtgtgatgagaaaaaggaagtcattagcctgttctgcactggacaggtctctccagaatattgtgaaagtttggttagggggcaacaatcatcttagttgcccttttacctttctatacagggtgtgatttctttggtgccaaattacttacttgtgggaaaaagaaagaatgaaaatttatgaatagtcttaaagcagatatcaatcactgcagagaactctaacatacagaactgaaccttgttttcaagttgttccagtaataatgaaagtggagattccctgtgacaccattcttcatccctctaaagcactggttctcaaccttcctaatgctgtgaccctttaatacagttcctcatgctgtggtgacccccaactataaaattattttcattactacttcataactgtaattttgatactgttatgaattgtaaatatctgtgttttctgatggtcttaggtactgctttgaattttcactctctatgcacctggcagtaagatgcttttcaagttcataagtatttccaaatccaaggaaaatatgttccaaaaatccatgtagacttagaacatgacagccagggaattctgcctgcctctagctgtctaggcacagacatatagcatggaggacgtgggataaagagcaccatggtcctgtggctcctcagacagcatcctggtcatcaggcacagatattacaaatgggagtctcaatacagggctccctgttcctcctccccctgttgttatgttagttacttttctcagtgctgtggggaaatacttggcaaatgcagcttcaagaaagaagcgcttattttggctcacagtttgagggtggagttcatcgaggcaggagctcgaggtagctgctcatcttgtatctgtgcttcagaagctggagagatgaaccctgatgttaaggttgctttctccttcttgtatcatccaggacctcagcccaggaaatggtgctgtccatatgtaaggtgggctttccctggacagttaacctggtctggaaacaagtcttagcagctgtacccagaggcctgtctcctaggcaattataaatgctgtcaagttgacaatacaactcctcaccgaatgttcagaacaaactgagaaacgcagtagtcacgcagaggcagaataacatgtttccatttgtttactcactatgctttttagagaatatgacacagtttttgaaaaatgcagaaataattgcagtgtagaataagacagatttacctaaccagagctggccaactgggagcctccaactgtccccataaaactgacagcatgggggaacagattattttccaaacagagaccaggaatggagccaagcaaactcactagctacgtgagtcagtcttctcccgaggaggggagaacgaaaatgggctcttgtctgacatccccatactggcccaacactaactcagagtcctccagagcaggcacaaacttgggagttatctttgtcacttgcataaggatgcttttgagacacttgattgttgagacaccaattttttttttccatacaggagacagattttgtctgttctgaaggaggaagagatgattttaataattataatgtagaagaacttttaggttctttggaatttgaggactccacagctgaggagtctgagaaagctgaagaggtttctcagcatggagtgaagtctcctgaagggactcaagagactgaacttgaccctgcacctgagcctgagcctgagcctgagcctgagccagccaaagtggactcaggggaactagaaggagtgttctcagagaacactgaggaactgcaggaacagtcctcggctcaggagagccaccctcataccaatagtgcagcagataatgctcagggagtgcagtcttcactggacaattttgaagaaatgctgcacgataaattaaaagtgccaggaagtgaaaacagaaccagcaatagttctcccgtctcagtggagcaggagaagatagatgcttacaaagtcctgaaaacagaaatgactcttgacttgaaaaccaagtttggttcaaccgctgatgcactagtgtctgacgatgaggccaccagactggtcacgtcattagaagacgatcttgatgaagagccagatgctgagtattactcagtggaaaatgaagaagaggagaatgcagacagctttgatgagctaccattactatcctttaccgatgaagaagagaatgttcccaggaagcctaggatggagaaatactcaacagatgagaatctgaacttgagtgaagatgataaagttgaacctcctctgcctcctggcacccaaaatgacaataaagatatattgacaacctggggggatactttcttctctattgtcacaggaggtgaaggagaaacaggtgtggtggatttagagagttctaacacagaggaagacaagaaggaggatgtgttggtttcagctagtcatcaaaggaagccacagtcaacagctgcccatatggaccctgaggataaagaagaccatctttttgtagaagactccaaaagaaatggtgaaaaggactcgaaaacagacccacaacttgtcataacaggagaagagaaggcgatccaggaatccaggagaggcctggcacaccaggagtccaaaacagaaacatcaagtgcttatccacctcagaacagcaagcttaaccctctgccagctgctgaaaaggccaaggaatttacattaaaagcagtctttgaaagaaaagaaaatggcctaaaagaaccagttatccatatctcaaaggagacagtccatgaagacaagaacagagacagcatagagagtgaattggtacacagagctctggggagtccagtgacagaaagtaacagcaaacaggaatccttgggtgctgtggcactcttaggagaccatcagcctgatgcatccaaggacaggatggaagtcccaggcgcttccgtcagtgggccagaagtgggccaatgggagggatttcagaatcaacctacattctcctctccagaggaaactggtcttccaggagaactggaaacgaaagttcctcctctgcgaagaaatctttcttggcagcaccaagagagagatgtacctgttgcagagggcagggaagaccctgcagatgtgaaaccacctcacccccaggccatacaagggacacaggaggctgatagcccggaagtgcccagtgtccatacccaaaggccagaagcagaggaggacgagttcccccttgaggagttactggaggatgaaaatgccgtgagcgcacagcagtctaaagaaaaccaccccagggctcacgacagctcagatatgaattctcagggttttgaaaaagtaattttggggacccttaatcttgatactgaagaaaacaaacaagcaactaatatgattttggagattgggaaaaagagcaaaaccacatcagaagaggcagatggtatgggcaaggagtcaggcagtgtgctggtggacaaagaaggcagtcatctggcaggtgtgagcgctcaggggctgtctgaagttgatggccttcctgacaagacagcagctcacaccccaggcttcggggaagttgttcagagtaaagatcctaacgacctacaaaaagacaaacctgaggcactagtcaacaccttgggacttgagattcctgggggagaagaaatctcagaatgggaacttgaggatccagaggagcttggaggctcagaaagccaggggcctgatgcccaaaaccttggggatgacctaccccaacaagctacacctgagattcccgacatagtgctcaagagcgtgagggaagacttgcccatcatcaacagcttctttagggaccagaagtccctgtatcgcttcctaaagtacttcgatgtccatgagctagagggcatgctgcaagatatgtcaataaggctgaaatcggcacatcgggacagcctgccttacaatgtggaaaaagtcctagataaagtcttccgtgcctctgagtcacgaattctaagtgcggcagagaatatgcttgatactcgggagaacaaaaatagagatctggggacacaagagaacagcgtgttagaagaagctgcagtgttggatgacgtacaagatctgatctattttgtcaggtaccaatactctggagtggagactgccccactggccacacctccacctcaggaggaagtctggtctggaccagtagaaggtaaagtacctgcctatgaccttgtggagttaggctgggaaagcaggagcagggtggtcaggaggggatgtgtgtttggggtggggtcacactaaagtgcttcatttcccgtgtgaaactctagtcacactccccatgtgtctaaaggagagggtcctgtgtgtgaaactctagtcacactccccatgtgtctaaaggagagggtcctgtgtgtgaaactctagtcacactccccatgtgtctaaaggagagggtcctgtgtgtgaaactctagtcacactccccatgtgtctaaaagagaggctctagacctatagggtctcgtcctcccttccagctcccttttaggcttaacatgaacacagattgccccttatccacaatactgcttttttttttttccttccatgggacagctgaaattggttttcattttcaaaaggaaactttataaaaaaaatcttaaaagaaagaaataaccaagaaaataattcacaaagtaaaactcttaacaaagtacagctttcaagtaaggcaaggggcttaataaacacaatttcttcatttacagggacgcatgtccagcattgtactactttcataacatttcagacttacagtgtacttcaagcatgtcccttctctatgacaccatgctacccccctctttcctcacccctccctctccagttagccttctttgttcctctagacaggtaagtctcaaacagaagtgcgtatttgctgaactgaccccaggacaccctgcctgctgtaagctcctgacccctagttgcaccttatgttctgggtaccatgttttgcaaatagaagtagccactgcaggtgaatggtggcgggcacagagttacaggaacatctatctgtcttctggaggtactaattttcctgagaattggaaggagtaagctttttttttttttgtttttaaatcaaagcttttggttaagaatggaaaattcaggttggagagatgactcagcagttaagagcacaggctgctctggcagagcacctgaattcctgtccccaatgacagctcacaatcattatacttctgttccaggggaatctgatgccctcctgtggccgctgtgggcactgcatgtacatggtgtactcacaaacacacagagacaaaacacccatacacacaaaataggatgattctttttcttaaaaaaaaaagattaaaaactcaaattaagtttttggtataaaatatgaggctgcaaagatgtgttcaggctcatagggaaggagatgggcccactccttgttgcttgggagtagtttgaccgaatttggttagctgcccacgtgcagaatgcccttctctacatgagctctgtgagccctgctgcctggctgtgagcccagctgcctgggtgtgaaggaggttatgttctgtatgtggttcctgggttctgtgctcgactggaattcatttctgagtgactgtgggggcacatgctggcttgccatggcaagtcaatggagtcttttccatgaatgcatttatggaacactgtggagtaaaggcttctgctttgtaaatctgtacttcagtcattgttaatctagagggaagaagttaaaactcttgtttccttctccactgtgcacacgccatctaggatattgggctgtgtggtgagggagtgctggtcagttgagtaaaccaaaatggacctttgatcaaactctctgtgttcctccccagagctgcagccacccatgaaggacagcttaccacaagaaaacacagaagatcttagtgttcggcttccggagcaacctggttccttggatcaacctgcaaccagggtgcaacttacagaggagcctggcctctcagagcagcctgtgaccagtgtacaacttacagaggagcctggcctctcagagcagcctgcaaccagtgtgcaacttacagaagagcctggtttcttggatcaacctgtgaccagtatgcagcttccggaagagcttggtcaacccgtgactgagcacatgagtgcctcatgggtgtcacagaagtcaaatactgaaaaagacatagatccaggtaaagtttattgtctacaaagtagacatgtattgtgaagaaggcctgctaagactattcatttgcagaggcaggaaagagaacaacccaggtgtgtataagatttaaaaatctcccctcaagtaacagaaaagcagttcagatgcatggagttcacaaaactggaaggaagccaggggccgtcattaatttgcaaacccagccactataaatcatcttagtgtgaacctgagctcttgtccctcaaccacatgctctaaggcagagctttctgttagacagcagcacaggaagtgctggtctgggacagcagtccatttgaaataagcccccaggaaagccgataggcaccaggtaacagtccaaactcctgggcttggttctccctccacactcccttccgaatggctacagtaagtaattcagttgctgttttgagttgctgcctccagagagcaaatacagctttttaagatgctgtgaaggagtccaggtggctttttagagtaggcttttaggaaacagtgcaggaatgacagtccagaggagactgacatctgcaattgtaaatacttgatttacagcacacaggaaatatgggtgggagataaagtgttttgttttgctttttaacatcctcaataatggtttcgatggtttcctaattgttgtattgctcactctcatttcattagtagctctcattgtgctacctgccacccaatacagtaccatgaggatgtcattactgactttctttgggtggggggggtgttgtttttttcacagccctgaggaccatactcagggcctcctgcgtgttaggatagtgtgtgaccactgactgccagctccagcagtattttgggtgtgcatgggagagtgtatgtatgtgaagcacagctttagtgttagtctgtggaaatgaagggtttcatgtcactagggtagctctccagctcatacacaaaatgcaggaaacatcacagcagggagaagtctagctgggccaagagtgaatgatgcaacaggggactctcctgttccagagcacatcatggtcatgtgtcacatttccaagttactgttcattcagaaaggtcctgtttactgaaagagtcaagcaccattgagatgcattgcttttgctcaaaaccttcagaattgggaaaagctgtgcttacagaactcggaacagaatctttgctttagatcttcccacatagtgccagctgtctttctagacaagtccttcccagtgtcaaaacgtgtacctcaggtgctaggatgctgacccgactgggaaatgtgaccattgtcagtactaggtcaatagtgaactgagttttagggttgggagagacccctagaaagtccagtccaactttccattaactgctgttgacaagacatgccgagctcatgtaactcaagctgaaaccctgcctgtccctcccccacctcctcgtgtggaatcctctcgggtatgactgggctttccttctctcacaaagcttctatgccagtgcccactccgcaaatcattcctggtatttactacatttcatggagtcgtcaccggcccataataagtattaagtacctgctacatgccactatgctaagcctcagtatattctagctgcaagcctttttctctttaatatttttatttagtgtgtgtatgcacccacatgtagagaaagcaacgttcaggagtcagatttttccttcagcaagcactcttactcactgagccatcttgttggcttctgaaagttgttcttttacaactcttctctaaagtttctaatagtgttctgtgaacaccaagtcacagatggctgaatgtgctggtctatatgtttttttttgatggtgctggttttttttttaattttttttgttttgttttttgctgttgttggttagtttggttttggggagatttgtttgtttgttttgagacaagatccctctctgtagaccaggctggctttgaactcagagatcctcctgcctctgcttcctgagtgcagggattaaaggcataaagcactctgcctggcaattctgtctatagggagaaataataaaatttgaaggtttgattgttttcaattcttctcaatggacaggagacatgatgaagtaccctggatagtggagatgattttatttttataatcaaaggtctgatggatccgattaagatcctggcttttgaatttctctgtgtaattttccttaggagaatcaaatattctatgctcaatgattagtatttagaggatactcatttaaacatttaaacgaagagaaacaattctcattctaaaacataaaagaaaatatggtgtcttttgcttccttttagctttccttgtaaccgaaagctctcctgttgggattggtgatgatgtagaaacgctcccggagacaaaggcagaggagccagccaatgtcccacctctggaaaatgaacttggtcccctgtattccttcattctttatttatgtaagatggtaagtctgagttccctcggctaaaaggctgactactacaggggtgttctgcagggaggaggtttgggtgaggactgacacctgccaaggctgaccttgaactcctgatcctccagctaacacctccaaagtgtttatgttgtagccatgggctaccaccttggcttgatttatagcaggttttaagttgactctgacttcacttgagtgaagaatttaaaatgtcctcatgatctctgagcctggaaaggtgggtgagtcccgagaagagcagaaagtggatgggtttaattaagggctgttagtttagcacatgagagtttactgcctggcaaggctgggcaggtatacacctaaaaaacatggtttacctcctggggacctttcagtatcccaggggcctggagacgtccacttgaaagagaggattttgtcagggttggtagagaagaaaggaggttaggagttagctgagatgttgcaagcaggaccaaagggaatatgatgtatagtttcttgttgaataatggatggggaagggtaataggacgccatggggtctgtggagagaggagggacacatgacaaaggcggtgtgtgtgtgatgtgagttctgtcaaactgtcagagttggtaccctttgaaggtttgaaatagggaagtggctggtcagatctgtttcctagaaagagctatggtggcaaaatgtttatttaggctaatctttctgaagagagtcgggaattcaagaagacatttaaccatccctagtagcttagtcaagtgtgaaggattagctcccccttgtggagtgtgtggatactggacatttttttaggtaaattggatgaggatggaggccaaagtgatgccaggattgcaaagtgtctccatggtcaagcagtctcctgtagggcctgtaattttgaggcttgtgtaatagtgttttgctgttgatattttctataaacaggttttgattcaggaaggttttgtttcaaatcctaatttaaaccttgtttaaattgaagcataagaagtgtacatctttatggtgtgggttctggacattggttttttgttgttgttttcgagacagggtttctctgtggctttggagcctgtcctggcactcactctgtagaccaggctggccttcaactcagagatccacctgcctctgcctcccaagtgctgggataaaaggcgcgtaccaccaccgcccatcagttctggacatttgatagatgtgtacattatgtaatgatcaaatcagagtagcagtcaggacaatgatcatttctatgtgtattcgtgttaagtgtttttacacacacacacatatatatgtgtgtgcatacgtatatgggaagcagtcagaggacaacctgcaggagtcacttccctcttctacctttgtgggttctgggaaccaaacccatgtcatcagagttggcagccagcaccttggcctgctgagccacatctccagtccacttgcaatcatttgagaaaactcataaactgtaataacagaaaactcagaactagctccactgtgcttttctgttcctcatccaattcctttgtcttcctgatgcccccttctgtttccaccaaccactgttccattccatttgttttccaagatgacaaagagcaaatgactaaactctgaacctcagcttcctcatctgaaaaatgcagtaaaaagtactgctgctgctgcaacagctgagtgttgggacagggtgaagtgcctgtggagatgtctggtctccttccagtcctgttcttttttatactcagagggcagcaataaagatgttgactgcccagcaaattccaaagagaggctgcctggatgaaaaagatggagcagaacaaatctatcttcagttttctccacagttgcttggcaaaggtgtggtggttttgagccgttgcagttctgatgcttccagtgagaagcaccctcacaatgctatccttcaagaaatccaagtgctgggatgtgggaggaagtctgacttcctcacagtcctaggcatgttaggattttcttcttggtttgagatagggacacagatatggtacaggatatggcctccacttgcaaggtgacagaagaacacacagacataaaaggcaaaaagggacacagtactataagatgctggctcaaactgcatgttccaaaaagcaattaatggctcaatatgcacaaagcatctgctagaaaccaaagatccctgtatggaggctagctacgtgactcaacaggtaaaggcccctgatgccaagtctgactacccaagctcagtctcacttcccactttgtggaaggaaagaaccagtgtccataagtgccgtaatatgcacatgcccaagaatacctactcacaaacaaacaaatgtaataagagggattctgatatgggccaagcgcagtcctgatgtcggaaaggcttgtgagggtaagatacgtgaaaactgaggacctatgaatggggcaatgtgaagtttccaacaaggagcacagtgacccggaaggtgatgagttctgctttgattaggggaaatgcagcaccacaggtcagcttcatgggtctattgttggctgacactagtgtctcactaattacagtaattccctgataggtcattgtgaggtctcccagcacactctgctcaccctttcccatgcccctggctagttcccttcattcccctggacagtctcacttctattttcatgttatatatacctgtatgcttttatgcatctagttaaaatctaggaatggccaatgatagaaaacatgtctatcttcctgagacgggcttaagtcacttaaaaagatcatctctagttggatctactttcctgcatgtatcagtgattctcagtgtgggccacctgcctttcagggccacgcattcttctgtagccaagtccttttttttttctttatttgaattagaaacaacattgaattacatgacaatcccagttcccttctccctcccttcctcccctaccacccccctgccaagtcctttttatattgactcagtttccttctgtatgaaaccctctgtgagatgtaactccttttatacacagtaatcctttgaatatgtgaagttgtatccttttgtaaatttctagactttttttttttttttttttttgacacaggatccctgtacatagctctggctgtctgtcctagaactcagtatatagactgggctggcctcaaactcacaaagatctgcctgtttctgctctagagagctgggattaaaggtgtgtgccaccatacccagctttttaatattttgtcatgaaaatttcaaacaaaagcagagagactaagtaggtgattagcattagatgacaacaatgtaacgttcattttcaaatctggaagcagttctctaagattctgacatatagaaagtaaacacggactggacaggtccagtctcttgaggaagcacaagtctcagatcagttactttgtagactttttctcagagagttatggtgtcagagctttaaacttatttagttcttaatctttttcacagtggtcagtattcttattttctcatcttgtatttgaaaaccacatcctagcactgaataaaattactattgctgctggaattttgagacagggtctttgtggtctgaactggcctggaggtcacttctgtagtgaaggctattctcaaagctgtagccatcttcctgccttggtctcttacgtgtccggattgtttatgagccaccacgcctgtcctactttctttttattttgttgttgttgcttttgtttttctgcatgtatgtctgtgcactgtgtgccagtctggtatccatggaggccagaaaagggcatcagatccccagggactgaagttacagacagttgtgaactaccatctggattctggggattgaaatccaggtcctctggaagagcagctagtgctcttaactgctgagccaccccaagctatctctgaagcccctagtctgatgtgtatgtatgtacctatgtttgtgtggagattatgtgtggttcattgcagttgcatgtggagggcagacgagagagctggatatcctggagctgaagtcacgggcatttgtgagccacctaccagggttcgagggacctaattccagtcctctgcaagagcagtgtgagttcttagcagccaagacaccctccagctccttatttccgttcatcatttatgctagggtcttactttgtaacccggtaaacccattatgtagcccacattggtctcaagcccacagtaatgttcctgcctcaaccttcaacctcctgtgtagggagatttctggattttattttctatcctatggtctgtattcctgggctcaaacccagccacctcctcccactatgggctgtcattgttctttcaaggtcttttcttgttgttgttctgcaaccctggctctcaaatttaggaacgtaaaaaaccctccctccaattaaatatccccattgcctttaaatttaagaatatgatttccggactatttattacccttgtccatttccacaaagtgcataaccttaaaaggagtgactcccaaatggggatattggtgaagaattggtagtgacaggattcctcccaggctccacccataatcccatcttgctagctccttggcggttgaccccatcccttgtggcaggtgagctttcttcatctggactgtccttcactggatctctctgctcactttgcactcgtccccgttcctccctcaatggactcttccgcccgactcttgtcattctccccgctgctacttttcggttctccccgcacccctgccgcattcacttggactctcccgcccagtcctctgctcttttctccccatcctcagccctcgaaggttctgctaagctttaggctcactctctccttctcacctctttcctggattcttccgaggagaggcggttggtttgtccggcactagtcccgccccggctctcccgggctctcccgggctctccgggctctcccggcctctcccggcctctccgggctcgcaggcttcctgggtgcgctgacgtggtctcctgggcgctgtctgatgacgcgttttcctggcggcctagtgcggaaggcgccgcgacccgggaaggcgaagttcgtcccgagtgtccgcccccggagccggcgcttccgaggcggaagcggtgagagccgactcggtgctgtcggcaggaagcgtcgcctccgcgcagccggccctacgcgatggactcggtgcctgccaccgtgcctgctgtcaccgcctccccgggggaccccgagctgctgggccccctgtcggtgctctacgcggccctcatagccaagctcctggaggtgacagtccccagtccccggggaggggccgccgcggtgtggccggcagagcgggagcccagggcgacggcccggagaggcgggagggcgggctgccgggcgggccgccgtgtgcgacccttaggtcgcgtgctcggttttcaccgagccccgtggagctgacaggccctgtgttacgcggtggatggagtcctttcctggcgtcactgtcgggggtggggccggcattgtaattagcagaattagcaggcagtgaaagtgtggagtgagcaggtgtgtgataataccacccctaaggaaacgtctagagctaaggcactgagtcgcctagacgatgtttgagagcatgaccactaaatccgttatcaagagctgtccagacttactcaacacttgtctcagtgtgtgtgaaaatggaacccatacgtaaaatattaggggaatagtacattatattattgtcacactggatttatttgcacccaccaaggttgattagttatgtattgaaagctttcgtgttgtgtgcttttcaaagtaataaaacaacttacctaaaagtatgacccagggagtttctaactatatatagacaacacaatatggcaaagcctattagaaactggaaatatatggccaacgtaaaggtattgagacactctgcttgaaaacactacaagtccaacaaatacgagactgacagtatcctgtacttttttaagcgggaggtgttgaagatggccgagagtacttacctgacggagactggttagaatttctatgatgactctttctgaacgttttgtaagatttttccaggtttccattatttttaatatgtctgtttcagttaattgccacattgcctgctaatgttcagcccggccctgacttttatggactaccatggcagcctgtgattgttactgcagtcttgggaattgtttcatttacaatcttctcctggagaactattcttgttgtaagtaaatcaaattatctcatcacatgactcaaaagtacatggggtattctataattactggtccttttatatatttatttttaattactaacatgaatacaaattaatgtctatgattctagctaaccttgtcaagtaatttagtataaatctttgtattgataaaggcttcagagaacaagttaacatatttataatttttatcaggaaacttttgatttaaaaaagttaaatcattaggtagatacatatacactgtaagtagaactaggaattcttaaaaccacatttaacactaatttcataatatgtatcagaagctttacaagtgaagtttctggatagtaagtatcctcttacatagtttgataccttgtgtagtaatctatctgaaagaaataaccaatcatacattaaagatcttatacaagaatggccaatgagacagtctttatttttaattagttattaggagtgtgtgtgtgttatggtgtgtgtgtgtgtgtgtgtgtgtgtgtgtgtgtgtgtgtgtgtgtgtgtgtgtgtgtgttttctgaatgagtacctgtacacataccatggagggtgtgcggaagtcagagtacaattttgttgagctggttctcatctacctttacctggattccagggattgaacttatcatcagacttacaccatcaggcagcaggcacctctacctgctaagctgtcttgtagccctggaagagtattttattagcatgggaacttgcagcaacctaatatccatagaatgagatatttgctgattccaaagacagtgagatgcagcagatgcttgtgacttgctatgaagtggaatgaagcacaaaccgacttgaaagaggtgttaaactgcacacagaagcacccccaaagtgacccatggccaacacatgaggccgtttgagtctcttcccattatgtgttgtatgtatttgcatgtgtcatatgtgcatgagaatgtcggtggctggggagtcccgaagagcctgtcagatcccctggagctggagttctgggtggttgtgggccacccaacaggagccaaactcccatcttctgcgagagaagcaggtgttcttaatcctggagccacctttcaagccttagtctttttctttgtatacgtttttcaagttctctgatcacatgcgttggtgctccaaaagtatcccttttatttgtagttacagattataggttgttcaaagacatattatgacattttcattcctttgttttcttttttttttttcctgagcagaatttgtgtttcagatgtacacattcacctctgaagccttgggctctccctgggattcctggttttgcgtcttcctagttccagtgaaatgggagaagtgagacttattttttgattgacaagtctagaacattagagagatgatgattcattttcctgtgttggaaggtttttttttttttttttttgttgttgtttgttttgttttagctcctagaactggagttacagttttgatctgctgtattggtgctgggaattgagcagctactgttcttaacctatgaaccatctctccagcccctgaaggcatcttcatataataagatatttacaagtgttttatattgataaggttgaaattccatggatgacttgtagatgggcctgagtgtcttgttaccactttaaaaacagcagcatttgagggtcaggagagatgatggctcaatgatttagtacttgttcttgtagaggaccccagtttaactgccagcactcaaagggtggctcataaccattgataaccctggttccaaggtacccagtgcccacttctggcttccacagccactaggcatgtatgggatgcacatacacatatgcaagcaaaacactcttacatatgaaataaatattaaaacattttagacagtagcattggaaaggagaaatatatttgcgtcatgaagaaatttagtgggtcagctcagtgggtaaaggtgcctgcggcccagactaacaacctgaattttatcccagggtcctgcatggttgaaggaaagaacccactcccacaagttgtcctccgatctccatgtggcatgtatgcacccatacacatgaacatttaaataaatacttgtaattaaaaaaacatttgggccaggcattgtggcatacagctataaccccagtactcaggaggcagaggcaggtgactacatggttaacctggtctacacagaggttccatactagccagggctacagagtgagaccatatctcaaaagaaaaagtagattgagtgaatctttctgcagtagttactttattgctttatcagctttattgctctggaggtcattactgtcttgggaacgatggctttagctgccagctgtcttgtacatttcctctggaagagcatcgttttcaggtttagtaccactgtaccattgttagcagtcttggaagtcacatgatacactaccagatccctagtttatgtgtccatgtttgtgtgtgtgtgtgtgtgtgtgtgtgtgtgtgtgtgtgtgtgcgcgcatatgtggaactcaaaggcaaacccctggtgtagtcctagccttcctgttttttaattgttcagcactgcatctggcaggcttctggcttgtgggattctgggaaacttttcttctgctttccatctcactgtagaagccctggggttacagatatgtactgccattcattcccctgggttctggggttcccactcagggcccctcacttgcatggcaagtgctgtatccaccaccccaaccctatctatcatctctaaattcagcaggtagacaactttgaataggatttctaggatgtcttctggtgagtgcatatctaaagacaaagattttccctttagttttgttttccatttgaacgctgatttccagtttattctagctattggggcttgtcggatcatatcaagtaaacaaattattgatagtttattgctaaggtagtagccatgtgtgttattaagcatcagtgcttgtatcttaagattgatgctctttggttgtgagcctagcctttgatggctgagccatctctccagcctgattggtgctcttttaatagatgcacaagcatacttttagctgcaaaacaagatacacatcttagtgtttttatctaatgaggctatttatgaagtattagtaccaattatatttgcagtgccttttagctttgtctttttaatttttttaagattgcgtttgtttatttatttatttgtatgcatttgagtcatggtgcacctgtgcagatcagagcacaacttgcagcttctgcaccatgtaggtcctggtgatggaattagaatgccacctttgcctgctgagtcattgcaccagcccagcctttaagttttaatagtaaggatttattatcctgaaccaagttgttgctaaattctcatttgtttatgattctcacctctgtgttaggaacaatatgctaattaggttttgacaacaaattctattttatttcttttcttctaggtaaagagtagagtatatcaaggtaaatcttcaggttcattttcctttgtctcaaccctttggtgtttgatgtgagttttctgtaagctagacagagatgccatgactcctggagtttactgtttctaggccaccagcttgactgatagaaccctgagggagtggggagacccgggttagataccgtgggcagttcaactttgaatgtcggtgcagtgcagacttattacatgtgaccacattaagtccttattagagtagatggcgtgtgggatggtggaatgcactggtattttgtatttctcagtttctatttgcaaatgacatttgaagtgatcccattttctgagatggaagcaagttgtggcatttccttaaattctgtatctctaaagtaaatttaaagtctttgtactgtattttccaaaactttaatattcttacacccttattgcaatcactacggactgcctttaagggcagaacagtcctgcaaagtatgttttccttttttagtgcccgacaacatgcctttgctgctagtatactagggcatccagctttatctcaggctcacaaacttacagatttcccttctttttagttactgagaagcaaatttctgagaagttggagactatcaagaaagaaaacgcagaacttatgcaaaaattgtcagattatgaacaaaaggtataattattctaacttctttccctcattccagcttgagcatttctgccttaacattctgtttgtgatctttttaagatacatattttacgtcatcatttcctaagagccatccaagacgttaagaggttgctttctgtatgaggttgtgcacttggacatgactttggtagcattataatttgtagttaattctaagttacaactattaaccctaaacactttcttttacctagatcaaagaggcaaagaaacatgatcaagaaaccaagaaacaaaacacaattctctctgatgaagctgtcaaatacaaggtaaaaatgtcttttgggaagaattacattccaaaagagaaaatgaatgggataagtaattcttgctaatctcagtgtctttgtttttgttaaggataaaatcaaggtacttgaagaaactaataaaattctgggtgacaaggccaaaagtcttcatcttatgttagaatctgaaagagaacagagcaccaaggatcaggacttggtaagcttagctgctaactggtgatggagtgcttctgtaatgagggcagcactgtccttgctgctaacttaatcgaaaataggagtcagggaagttgaacctactgtggcttatcttggagaattttaacttgtaacccaacaagttattcttatgggcataggaagagcacctttgttctcatcgctgggtgattgccaatagtttagctgtgctttctagaacaggtggagcagctaggaattctagcctcattgaatggttcaagtctcattgcaataaacttatttcagtttcatatagcagttgcagagaaaatagacctctcatctctaccccagctgagctaatcacccagctaaagaaacagtagccacagttctctcttcatttactgtattctttggagaacattatgtatggctcacagttagagggaggaattacatcttccacctccttgaggagctggtggtgtctttataaaatctttggaattcttcttatgagatttatctattttcctccaaatcctactgttttcagtataggcaatggactcccccacccccacccccaccccactctgggattctgaccttagtgtcgaacccaggataagtgggtattctaacgttgagccacagcactacccctttttattttttaattttgagacagtctctactaagttgcccatgctggctttgaaccctatctgtagccaagacaggcctcgaactcatgatccttttgccccagcctcttaaatagggtatattagcaggcttggctaggcagagaattttttttttaagttttagttgaaagatgttttattttctttcatctttttatgtggtcagatgctgtattatctcataactaagaagcttggattattattgcattgaccctccccaggccaaaattggattccttacttttaccaaaaacataggctgttaagcgatatgcttattaatgtttcttcctttagtgtgtgtgttgtctagttttatgtcaacagagaagttcagttgagaaaaagccctcatcagattggcctgttgaggaagcctgtgctacagtttactaattgatgattgatgagggagagcccagctccctataggcagagctacctctgatctggtggtcctaggaactacaagaaagtgagctgagtaagccatggaaagcaaactagtaagcagtgttcttctatggcctctgcatcagttcctgcctccaggctcctggtctgactttcttagatggtggactgtaagctgtaagcagaaataaaccctttcctccccaagttgctcttggccacagtttatcacagcaatagagagcaaatgaaggtagcatgtgtgcgcactagtgactctgctgagacctgaggctctgtgctctgctttcatgggtcaggtaatggaaaacaagaagactattgagaagttgaaggatgtcatttcaatgaatgcgtcggaactttcagaggtgaggctgcctgtgtgtcctacacacgagtaatagcattgtcttagtctggttgaacaaaagtttgatgtgtgctaaaacatgtaaaagatgaaactcgaatgatatgtgcttgagaaaatataacgttttccttttgcaatttatttactaactgggagtgtttcacattaggttcaaattgcccttaatgaagccaagcttagtgaagagaatgtaaaatctgaatgccatcgggtccgagaagaaaatgccaggcttaagaaaaagaaagagcaggtaaggcaagttcacctaatgggagatagcatgtcctttcagtatcttctcttagacctgttttaaggaaaggagtactcaggctgggggttgggaagtagaaaccgtgcttctcagattgagcaaatgtctgtgttgtgagttttctgtacaattcatggcagcactcagggggtttattttattcttgtcaaatgccagtcatttgttgaactatttttatatgagatggtattttataccagtctttgactagttatttccttactgacccagaggaggttatatgatcagagtctggacttgggagcctgagatgtgcccagccattcatcctggaagtgattaagttgaattagtatcatgtcctgaaggctgaagtcatctggtcaacctccctgatcaaaccgatgttcttcctgcatctctgagggttggaaccattcaccccttttctttactgatactttagctcctagtgacatgccaaggagagacgtgtcttcctaaccccaactcacatatcagatgtctcctgtacacacccctgtaccataggaattcatattttttgacttttcagttgcagcagcagattgaagagtggggtaaatcgaatgctgagctcactgaacaaatcaagacaatcaagagggcccagaaggacttagaagtagctcttactcacaaagatagcaatattaatgtaagtttatcctcatgagtacacacttaaccctgtgaattctgctggtttagaatcaagaggcttttacaccatttgcttcttttctaggctttgactaagtgcatcacacaggtgaatcggttagagtgtgaacttgagtctgaggatcagaatcaaggaggagatgagtcagatgagttggccaatggagaagtgggaggtaagatctgtctctgagcagttgggcctgttttgccctcttgacctgaatttcagttcactgaggctgcttttcagctgtggcaagctttctggctatgggctcacaccactggacttgtagatgtttaagtctgtgttgggccaggtgggttactcaggtgtagtataatgtaggcatgcaaaggaccctgacatggacagtagagctgcttcagtcatttcaggcctctaagtattaaaacactgcctcatcctttgtcgagtggtctctgtagctctgctcttaactgaggtgactcgaatcacagctaaagctgtggggtaagaagctagagttgcatcatcggatgctagaggccagcatgttaactgatgaagaactgtctcccatgtctcccagttgcatagcaactgctccttgtcactgcgggtgctttaaatcacacccagcagcagattcaagggagaacaaaggccttggagcaaggatgacattttttttttccgagacaggatttctttgtgcaggatgatgttttttattgaacaaactggtaatcaactttgtgcatctacattttcaattctaaatcagttaatcaggtctcttagttggttttattttcattccactgtttggatatgatcattgtctgagggaaatcatggaaatgtcattacaaggcaaggaagagaaagcaactgaagccttttctcttgtaggtgacagaagtgagaagatgaaaaacagaatgaaggagatgatggacgtgtctcgggtatcgtcctgtttgtagtcccagaagcatccaggagtccttcctatggctcacttttaagactcactctttcttctgtaatttttagacacaaactgcagtctcaatagttgaagaggatctaaaacttttacaacttaagataagcgcgtcaatgtccactagatgtaacctggaaggtaggttcttctagacacaaaattgctattatattagaatgatttaaaatttgactaaaaagataaataggtcctagcatttgtgcttctcacttctcagaactgcccccctcaccccagtcctctctctcaagcctctgcacacacagggaaaacctttgtatcccttacagaccaaatcaagaaattggaaggtgaccgaaactcgctgcagactgctaaagctgagctagaagatgagtgcaaaactctgaagcagaaagtggagatcctgaatgagctctaccagcaaaaggagatggctctgcagaagtaaggtcccactcctagccgtgcagccccaccttgtctaaagttcatgcacagtttctccactttataagtaacagggacttggcttctccttagtgctttgtttcccgtgtgtgtgtgtgtgtgtgtgtgtgtgtgtgtgtgtgtgtgtgtgtattgtgagtatgtgtgcatgtgtgaatgtgtgtgttgtgagtatgcgtgagtgtgtgtgtgtgtgtgtgtgtgtgtgtgtgtgtgtgtgtgtgtgtgtgcatgcttgtattagatgctggttttctatatatgtgcactacatgtactgatggggtaagcacacgtgcacaggtgtgtggaggtcagaggtcatagttggctgtcttttcctcctttgatgtctacctatattattttttgagacatatctcttattgactagaagagcatctattcttctaggctgtctggccaatgagcttcagggatctgcctgtctctgcctccccctgctgggctgggttataggtgtgcacctccacgcctggcttttatccagtagttctaggacaacctaaaaaagtatttaatattttaaacacacagggcagaaaaaagcatttgcccctgctttagttgaattacattgctgtttcccacaggacaggaaagcacacatatttaatccccaaagcaaaggcatgcagatctccacgttcaaggccagcctggtctacagaatgagttccaggacagccaggactacacagagaaagactgtctcaaaaacaaaccaaaaccagaggataggaagtgacagagagctgacattataaggagagacattgacttaataactggcttatcctaggaaactgagtcaagaagagtatgagcggcaaaacaaagagcagcggctgtcagctgcagatgaaaaggtggtttcggctgcagaggaagtcaaaacttacaagtaagttcaagctctgcacagggacaggggcctcatacagggttgtgcttcgtttctacaaccgttatgtagtagaaagcagcatagaaactaagttcattcattcattcattcattcattcattcatccattcatccattcacagagggaaaaagaaatgtaaagggctaacacatatttacttagcttgcagattgaaggacggtagaggcccttgtttcctgcagatggctgaggaatcatgatgggaaggagttttatatattagagcaatggttctcaaccttcctaagactgccaccctttaatgcagctcctcatgctgtggcgaccccaaccataaaattactttcttgctacttcataactgtaactttactactcttatggattataatgtgtttctgaaggtagaggtttgccaaaggggtcttaacccataggttgagaaccgctattttagagtcagtctttaaagaacacagttggctatgtgacttcaaaaatcattgcagtaattgtaccatttgatagatcagtagtcgttagcctgtttaattttttattgatacaagaaaaaaaagttgtgtagttgtatagaagcagatattcatagtgggattttttgagaatatattgaagaccattaaggaaatgataatctaagactatctagccatgaaatgacaggaaaattaatgtgtttgtttgattatgctgtacttttgagtaaatttatataaaacatgtttttgtatgtctggtaacatctttaaaactgtagctgttcagagtcaagggaactttgttggattgttgccaattttatccagttgtgttttaagtgataatgctgagtataattcttaggcggagaattgaagaaatggaagaagaattacataaaacagaacgatcatttaaaagccaggtaaaaactatattggcctacattagttgcagattgtttttgaaagctaatatatgttaaaatggacattataaagagcctgaacatgtatttggtgtgttgtcttttcagattgctgctcatgagaagaaagctcatgaaaactgggtaaggatttttcttttttttttttctttttgtgcacagactgccacatctgatcacaatgcctttctctcctacagctcaaagctcgtgctgcagagagatccttggcagaggagaagagagaggctgccaacttaaggcacaagtatggagttttgaaacccatttttcagtgcttttacagtgtttgtatgctagctggtatgtaataaggatttgattgctatttcattttaagtccattctttctcaatattcaagattattggaactgacccaaaagatggtattgagtcaagatgaacctgtgatcataaaaccaatgccaggaagaccgaatacacaaaatcctccccgaagaggtaggaagcactttgtacaaggcagcaggattttggtgtggaatgtgtggaaataaaacttgacttctgtaatagggatgataccctagaaagactcctgagcttcctggagggaaggggctgtcacagagtggtaacaaggcattgctgtcttcaggtctgagccagaatggttcttttggcccatcccctgtgagtgctggtgaatgctcccctcccccaccagcagagccacctgggagacctctttctgccacactcagtcgaagagacatgcctagaagtgaatgtggtgagcactggtgtacctagccctctgtactgcaggaggtgaaggggttcttcccttagaattcagatctgtccctgaacagaaggggtctctgtcaggaggtgaaggggttcttccgttagaattcagagctgtccctgaacagaagggggtcactgtaagcgctgccataggacagaaagatgtatagccttctagaggcacctgctttgctttgtaagaataatttgtactttgaaatttaactgaagtttaaattctgtctgtgacgctaagaaaggttagaagtcagactcagagatgtaaccagtacactgctgtcagagattcaagctacagaacaatattcttactacaaagtccattggttatctttaaaaccaaggcagtcttggggctggagaggtggctcagtggttagcagcacttgctactcttccagaagacctaagttcacacttcataccaccaacatggcagctcccaaccacctttaactcaagtcccagggtatctgacacactctcctaacctctatgcatactgaacacaggtggaacagacacatacatacaggcaaaatgcccataaaataaaggaaaataatctagaaataaatttacagaaactggggcaacttctgcttcaatattgaagtctgtgtaaattgtgactcatattttgagacccctctttgggattgcaggcatgtgttacctcacctagcagatctatttgtagtgctgctctttagttaagagttgaaccctagccacaacagactgattccccctgaaaactacatgtcaagggctctgttgtttctttcccagggtcattggacaggcatttacctcgtcctcggtggccatcagaggcatctgggaaaaactctgcttctggtaaggggcctaaggactttctgcatgtgggaccttcattcttttcagaacccatgtgagtctaattcattctctggcctcttgcagacccaggaccaggacccatgatgaacagcaactcccggagctcctctccagcaaaggccacggatgagaacaaggtacgctctgcagatgagtatttcctactggtacctgcttcctctcttgtttatttgtctatttgtttctttaaaagcaaactgttccaaaagatcctgatggcccctcatgttccagcatcacccctttagctgagcatacagtagcagtaagtgtttagagatcgagggccagagtgggctttggttttgcttggtttgtccttagaagcttctaaaagcatgacacagcttcaccttgtcaccatctatcgagtggcagtatcactccagcactccttgactttggagtgccactgagccagagtggttgtttgttggtgtccttttcactgtgagtgagattactaaccagtttagagcacttgctctaactactagtacatagtacatcatcatcagtacaacctatgctgtgtgctttgtgctgaaagccatgagtgacagagactcactgtaagtcatactattcataggcatcaggtttggaactgtgcttctgaaaccccctgcatctgtgtacctggccaagtgtttggaataatatgaaagcagactgcttacacacagaaacgtgtgtaccacctcttgatctggtcctcagcagtggccaagtaattttcagtgttcacagcagtgtgtactcctgtgacatgtgtggctattggagttgcttagccttctgcactacagtaacacagtgtggaaattcctgttctgtcgtgtgtagtgttgccattcaatgaaggtcattactggagctgtctacgtaattacaaacataaaactgtgctgggaatactgtgaagtccagtgtggggctccagggatgtgcatgtcttgagaagtctttatccaagccaggctgggtgagacccagaggcctttctagacttcagacactgaagacttcaatttggaggaataggagggacacagccttggagtggagcctggtatctgagttctagcctgccctcttacatgcagctcaacttttcttgcctttgcttgcccaggtttaaatgaggatagtcacacagacggaaagatccaagaatttggataatataccaaagacctactgaggctgccctgaatggttactattactgcttgtgtacaaaatatattttcattctgttctctgtcttcttaatatgtacatgtggagttacagtgatgagagatagagcatttcttttgatacggattgcagtgtgtatggcatgccctgtggtacaaccacttcttgggaaaagccagaagacagtcaacttcataagaagttggcttttccctgtcttgtgcagatagcaaacagtaacctgagtcactgcttgcagcatccttctgacctctgagttgtcattggcaacaaggggtgaggtggcgtgttaggctgacggttctttggacaggtgccagtttaataaatagtctttgcaccatgtaaaagcatttccaaactttgtttcttttctacaggttaacatgcctcccagagggccccctccattcccaggggcgcctctctttggtgcccctttgggaagtcctgtgccaccacccactcgatatggaccacctcctccactgatcgggccttttgggcctcggccagttcctccaccatttggtatgatgatctgaacagtattgacttgtaaaacatactcatcttttctattccttgctaaagtacttgttaccatagagctttacaattgaggatgcagctgagaacattgtaacgattgtgaagcctctgagcacataaaggttctatgtaatctccctaaactgagttgggtatggctgacaaggaaagccagcaatgttccctctgcaggtgcatttgaacaccgtattgtatatggaaaagatgggtgtcacatgtcataaaaccctgtaagtcacagagacacatagaatcataagacactggtcagagaatatagacaggaagctaaacaatcccttctccctggcactaggcagaagagagctgttacacagaacacaatagcagcctagtgaatgtagatcaatttgagtccagctcctttgtgtgttttggccacatgaacttctggttgacacagtggtaggtctttatcaactttgttgcagtgaatgtgtgtttcataatgaatctgtgttttcactctgttcttggcatggctgttactctgaatagagatgttctgaaatgcagaattgcagagtgaaaagaaaacctggacttaagcagagccaggtttaaacctgtgctttgctcagtggccacagactaatttcaatttgctgagtctcttttgcctcatcataaagtcagggtgccacagttgactttctagggctgagaaattaataaatatgttactgtacttggaatgattgctcatttcaatgtgtttcttggtatttacatgactcttgtttcctagttccaggcatgggtccaccactaggcataagagagtatgcaccaggtgttctgcctgggaaacgggatctgcctgttgaccctcgggagtttttactaggacatgcaccatttagacctccgggttcacttggtccaagagagtattttattcctggtgcccgtttaccacctccaactcatggtcctcaggactacccgctgccacaacctgctgcaagagacttactgcctcctggcccaagagaggaagccccacctgcctctccaagcagtgtccaagacagttcaccggcttcaaaacccatcccttaactttgtttgacctctatctgagtgagagggaaagattggacagtacattgttcataacatcaagaatttcattggcttcaaaacctaaaagtttcttatacagcgtttgtttttagtactaagctgccttggcagtgtgcatttttgagccaaacaaaaaaatattattctctattctaagtaaaaaaaaatcatatcttaagctaatgtccttccaactttgaaatgtgcaataaagaaatacctgtgtctagttgatgtagcatatgtaattgctcaatgatttagaatatcctaaagtatgaacatttcctgtggaaatgctttaggaacatgtatttccattgccttggtctagtgtgtgccagttgatacagagcgaggtgttcacagctccatctgtctgtgtctcaaagactgttacgctaaaaacgtgtactcaaggatcacaaactcgtctttgttgctaaagttctttgtagtaatagttcataaactttgtttattagtattttccaagtgtctgttgattctttgggttgttttgagacttgtatcatttgggaaacctgacaactggccttctggaactctagtggtgagtgtgcacagtccatgtgacacagctacgttttccctaagtcaccagtgagctctacaggaattcttcctcttattcaaataagtcagcagccccacctatcttacctttctgtgccttcttgatgctcgatgcctgtttgggaacgatcttctgtgtagaagtttgcattagtatcaagaattatttgtagctggatgtggtggcgcacacctttcatcctggcttctgggaggcagaagcaggtgggtctctgtgagttacaagacaaccacggctacatagagcctgtctcaaaaactaagaggaaaaaaattattcggaccagcaatatggcccatctagtaaaggcacttactgccaagcctggcagctttagttttatccctggagccacacatgaagagaaccaactcccagtagttgtcctctgccctacacacacacacacacacacacacacacacacacacacacacacacacacacacgccttaaaatgtggagggaaaaattaaattacaattttttcacctcatgttttgttgcttttaaaaccatttttgtactaagggttcgtaaaagatcaaaatcacatgccatgactgtaagatcatttctttttagaaatagacattctgttctctctcacatcaccttgcagctgagtttcaaggaatatgacaagcaagaatcaggaaggtgtcatgaggaagaatgattgcaaactagaaaacttaactatgtcttcagttgttttgagattgggtctcatagtgtagcccagcctggcctcagactctcagtgatcctcctgtttcatctcccaagaggctggaatttcaggcttgagtcaccttgcctagcttaattctttgatagatactaatgaaaaattaatattcaaatagtggtgcttttatttataaaccaggtttaagtctaggaactggtattgcatcatgtaaagtcctgtatcccttttacagtgtctttaaaacaactggttcagacaatatatagtaattgtagctgcacattatgtaagagctgtaacatgtaaagctgtaaaaggtggaaactgcttattgtgacactgtgttccctaaagtcctgtgaagtcatgatactgaaatctagggcatagtaggctgggattttaaagccacgtgggtctttcgaaaaatgagaaacagcttcaatgagaaataaaatcctcaacatctgaagacatggtatacaaagacaggctctctgaatgcagtaagttctgaggtagcctgtaaattctccagtaagagttagatatgcctagcccaatctgaaatttcagaagattttatataagaaaacaccacagaatagtgtaggtcattaaaaattattttttattctatgcatatgtgttttgcctgcatgtatgtacgtataccacatgtatgcctggcgctcatgatcccctataatgagagttataggcagttgtgagccgcaatgtgggtggtgggaactgaaccctggtcctctgcaagaacagccagtgctcctaatccctaaaccaccttttacacccctagcatatgctattttttattcttataaaaaaaaaactaaattacaaatacagcttctggaacgtatctaccaacctcaggacccaaaatcaatacattcatatagtcacacattgttccttttttatttttttgagataggatctcaccaatgtagtataggctttttcagagttgataacctacctccactatctcagctacctaagtttagatgacatagaaagtaaagattttatcagctaagaagacaaatagtaaagctaagtaacaccctacccccccttttccaattgaatacggcggttttttcccctctaaagccctgtagttttcctgccgtatatgataaatgtcagaaagatgtagagaaacagtgtggttatctgggcagttctgagccattcaccactgccttccctccacaccatcggattgtaatcctaggctacaaaagcccataataagccatcagtctacggatggcacagaggacatattaccacatttgaaccacttttccatttccaaagttcctatttcagtagttccctccagctgtttctgggctgagtggctgaactgtcactaggagcagtgtacctcagcctcaaaagcatttctcttagagcacaggctgattttctatggcagtttttttttttttttttcacttcaatggaactagtgtaatgtgaaatgcccagtgttaactggtttaagacagtcttttcaatcaagtctgaattaaagccaagtttatcacaggaatttcccttagctctcttgaaccctgatggcaggcacctgtagttcatagaaacagttatgagaaggaccagtgctgtagcacagagacttaacaagttgctatttgattattattatttttgtttatttgtttttttgagacagggtttctctgtgtagctttggcacctatcttggcacttgctctagagaccaggctggcctcaaactcacagagatctgcctgtctctgcctcccgagtgctgggataaaaggcatgtgccaccaatgccctgcttccaagttgctatttgtattatggtctgtgagaaaaaggacagtgtacagtctttgttacatcttaataatagtaggtttgaagggattgcttttttatgtctagtgaggaacaccaaacacaaggtactgagaactccccaggtccagagtactgccctgtgtactgagaactccccaggtccagagtactgcccaggttactgagtactggagaggtggctcagtggttagcagcacttgctgctcttccagaagacctaagttcacacttcataccaccaacatggcagctcccaaccacctttaactcaagtcccacgggaattaacaccctctcctggcctacaggcttattgcacacaggcggtacagatacatgcatgcaggtaaaatacccattcatataaaggaaaatattttggaaataaatgtacagaaactgggccaactcttgtttcaatattgaagtctgtgtaaattgtgactcatattttgagacccctctttgggattgcaggcatgtgttacctcacctagcagatctatttgtagtgctgctctttagttaagagttgaaccctagccacaacagactgattccccctgaaaggactctgttgtttctctctcaagggccgatggacagacatttaccttgcccttgttggccatcagagacatctgggaaacactctgcttctggtaaggggcctaagaactttctgagcatcctgctgcgggaccttcattcttctcagagcccatgtgagtctaagtcattctctggcctcttgcagacccaggtccaggacccatgatgaacagcagctctgggagctcctctcctgcaaaagccatggatgagagccaggtacactctgcagatgagtattccctactggtccctgtttcctctcttgtttgtctattggttcctttaaagcaaactgttccccaagatcctgatggcccctcgtgttccagcatcacccctttagctgagcatacagtagcagtaagtgtttagagatcgagggccagagtgggctttggttttgcttggtttgtccttagaagcttctaaaagcatgacacagcttcaccttgtcaccatctatcgagtggcagtatcactccagcactccttgactttggtgtgtcactgagccagagtgcttgtttgttggtgtccttttcactgtgagtgagattactaaccagtttagagcacttgctctaactactagtacatagtacatcatcatcagtacaacctatgctgtgtgctttgtgctgaaagccatgagtgacagagactcactgtaagtcatgctattcataggcatcaggtttggaactgtgcttctgaaaccccctgcatctgtgtacctggccaagtgtttggaataatatgaaagcagactgcttaacacagaaacgtgtgtaccacctcttgatctggtcctcagcagtggccaagttaattttcagtgttcacagcagtgtgtactcctgtgacatgtatgtctattggagttgcttagccttctgcactacagtaacacagtgtggaaattcctgttctgtcgtgtgtagtgttgccattcaatgaaggtcattactggagctgtctacgtaattacaaacataaaactgtgctgggaatactgtgaagtccagtgtggggctccagggatgtgcatgtcttgagaagtctttatccaagccaggctgggtgagacccagagcctttctagacttcagacactgaagacttcaatttggaggaataggagggacacagccatggagtggagcctggtatctgagttctagcctgccctcttacatgtattatgacccacaatcagctcaacttttcttgcctttgcttgcccaggtttaaatgaggatagtcacacagactgaaagatccaagaatttggataatataccaaagaccgactggggctgccctgaatggttgctattactgcttgtgtacaaaatatattttcattctgttctctgtcttcttaatatgtacatgtggagttacagtgatgagagatagagcatttcttttgatacagattgcagtgtgtatggcatgccctgtggtacaaccacttcttgggaaaagccagaggacaagcaactttataagaagttggcttttccctgtcttagcagatagcaaacagtaacctgagtcactgcttgcagcatccttctgacctctgagttgtcattggcaacaaggggtgaggtggcgtgttaggctgacggttctttggacaggtgccagtttaatagtctttgcaccatgtaaaagcatttccaaactttgtttcttttctacaggttaacatgcctcccagagggccccctccattcccagggtcacctctctttggtgcccctttgggaagtcctgtgccaccacccactcgatatggaccacctcctccactgatcgggccttttgggcctcggccagttcctccaccatttggtatgatgatctgaacagtattgacttgtaaaacatactcatcttttctgttttttgctaaagtacttgttaccatagagctttacaattgaggatgcagctgagaacattgtaacgattgtgaagcctctgagcacataaaggttctatgtaatctccctaaactgagttgggtatggctggacaaggaaagccagcaatgttccctctgcaggtgcatttgaacactgtattgtatatggaaaagatgggtgtcacatgtcataaaaccctgtaagtcacagagacacatagaagtataagacactggtcagagaatatagacaggaagctaaacaatcccttctccctggcactaggcagaagagagctgttacacagaacacaatagcagcctagtgaatgtagatcaatttgagtccagctcctttgtgtgttttggccacatgaacttcaggttgacacagtgataggtctttaccaactttgttgcagtgaatgtgtgtttcatagttaatctgtgtttcactctgttcttggcatggctgttactctgaatagagatgttctgaaatgcagaattgcaagtgaaaagaaagcttggacttaagcagagccgggtttaaacctgtgctttgctcagtggccacagactaatttcaatttgctgagtctcatttgcctcattttaaagtcagggtgccaagctaggaatctggtattgcattatgttaattcttgcatccattttaccctgtctgtaaaacaactggttcaatcaatttacagtaactgtagctgcacattatgtaagaggtgtaatatgtaaagctgtaaaaggtggaaagtgtttactgtgacctgtgttccctaaagtcctatgaagtcacattattgaacctaggacatagcatgctgggattttaaatccttgtgggtcttttgaaaaatgagaaacagcttcaatgagaaataaaatcctcaacatctgaagacatggtatacaaagacaggctctctgaatgcagcaagtcctgaggagcctgtaagttctccagtaagagttcaatatgcctagcccaatctgatattacagaagattttatataagacaacaccacaggatagtgtagtcattaaattatttttattgtatgcatatgcgtttttcctgcatgtacacatatatgacatgtatgcctgctggtcatgattccaaaacagggggccagatcccctataaacacagttatgagcagttgtagccacaatgtcggtggtgggaactgaaccctggtctgcaagacaagcatgtgctcttaacctctgaaccatctcttacaccccgagcatatgccatttttcaaccttataaaataagactaaattgcaaatacagcttctggaatatatgtaccaacttcaagacacaaaatcactacatttatatggtttcaaattattgctattttttttttaagaaaacgtctcaggtatgcacttcaggctttttcagaattgatctcaactacctcagtttagatggcatatataaagtaaagattttaccagctaagaagacaagtagtaaagctaagtaacactctcctcctcttttccaaattgaaaatggcgatttttttcccctctaaagccctgtggttgtcctgtggtatacgataaacaatgtcagaaagatgtagagaaacagtgtggttatctgggcagttctgagccattcatcactgccttccctccacaccatcggattgtacatcctaggctacaaaagcccataataagccattagtctatggatggcacagaggacatattaccacatttgaaccacttttccatttccaaagttcctatttcagaagttccctccagctgtttctgggctgagtggctgaactgtcactaggagcagtgtacctcacgctgaaagtattcctcttacagcacaggctgattttctatggcagttttttttttttttttttctttttcacttcaatggaactagtgtaatgtggaatgcccagtgttaactggtttaagacagtcttgtcaatcaatctgaattgaagccaagctgatcacaggatgttcccttagctctcttgaaccctgatggcaggtacctgtagttcacagaaacacagttatgagaaggaccggtgctgtggcacaagcattaccactttgctatttgtattatggtctgtgagaaaaaagaaaggaaaatgtacagtctttgctacattttaataataggtttgaagggatttttgttttcattttaattctagtgaaaaacatcagacacaatgtactgagaactccccaggtccagagtactgcccagggaactgagtactggagaggtggctcagtggttagcagcacttgcttctcttccagaagacctaagttcacacttcataccaccaacatggcagctcccaaccacctttaactcaagtcccagggtatctgacacactctcctggcctccataagtattgcacacaggatgtacagatacacattcatgcaaaatacccacaattataaaataatttagaataaatgtacagaaactagggtaactcttgtttcaatattgaagtctgggtaaatttgactcatgttttgagacccctctttgggattgcaggcatgtgttacctcacctagcagatctatttgtagtgctgctctttagttaagagttgaaccctagccacaacagactgatttcccctgaaatctacatgtcaagggctctgttgtttctgtctctagagccaattgaaaggcatttaaattactctcagaggccatcaaaggcatcagggaaacactctgtttcttgtaaaggggcctaaggaatttctgcacctactccatgagggaccttcattcttttcagagtccatgtgagtctaaaccattctcctgcctcttgcagacccaggaccaggacccatgatgaacagcagttctgggagctcctctccaacaaaggccatggatgagagccaggtacactctgcagatgagtattccctactggtccctgtttcctctcttgtttgtctattggttcctttaaagcaaactgttccccaagatcctgatggcccctcgtgttccagcatcacccctttagctgagcatacagtagcagtaagtgtttagagatcgagggccagagtgggctttggttttgcttggtttgtccttagaagcttctaaaagcatgacacagcttcaccttgtcaccatctatcgagtggcagtatcactccagcactccttgactttggagtgtcactgagccagagtgcttgtttgttggtgtccttttcactgtgagtgagattactaaccagtttagagcacttgctctaactactagtacatagtacatcatcatcagtacaacctatgctgtgtgctttgtgctgaaagccatgagtgacagagactcactgtaagtcatgctattcataggcatcaggtttggaactgtgcttctgaaactccctgcatctgtgtacctggccaagtgtttggaataatatgaaagcagactgcttacacacagaaacgtgtgtaccacctcttgatctggtcctcagcagtggccaagtaattttcagtgttcacagcagtgtgtactcctgtgacatgtgtggctattggagttgcttagccttctgcactacagtaacacagtgtggaaattcctgttctgtcgtgtgtagtgttgccattcaatgaaggtcattactggagctgtctacgtaattacaaacataaaactgtgctgggaatactgtgaagtccagtgtggggctccagggatgtgcatgtcttgagaagtctttatccaagccaggctgggtgagacccagagcctttctagacttcagacactgaagacttcaatttggaggaataggagggacacagccatggagtggagcctggtatctgagttctagcctgccctcttacatgtattatgacctacaatcagctcaacttttcttgcctttgcttgcccaggtttaaatgaggatagtcacacagactgaaagatccaagaatttggataatataccaaagaccgactggggctgccctgaatggttgctattactgcttgtgtacaaaatatattttcattctgttctctgtcttcttaatatgtacatgtggagttacagtgatgagagatagagcatttcttttgatacagattgcagtgtgtatggcatgccctgtggtacaaccacttcttgggaaaagccagaggacaagcaactttataagaagttggcttttccctgtcttagcagatagcaaacagtaacctgagtcactgcttgcagcatccttctgacctctgagttgtcattggcaacaaggggtgaggtggcgtgttaggctgacggttctttggacaggtgccagtttaatagtctttgcaccatgtaaaagcatttccaaactttgtttcttttctacaggttaacatgcctcccagagggccccctccattcccagggtcacctctctttggtgcccctttgggaagtcctgtgccaccacccactcgatatggaccacctcctccactgatcgggccttttgggcctcggccagttcctccaccatttggtatgatgatctgaacagtattgacttgtaaaacatactcatcttttctgttttttgctaaagtacttgttaccatagagctttacaattgaggatgcagctgagaacattgtaacgattgtgaagcctctgagcacataaaggttctatgtaatctccctaaactgagttgggtatggctggacaaggaaagccagcaatgttccctctgcaggtgcatttgaacaccgtattgtatatggaatagatgggtgtcacatgtcataaaaccctgtaagtcacagagacacatagaatcataagacactggtcagagaatatagacaggaagctaaacaatcccttctccctggcactaggcagaagagagctgttacacagaacacaatagcagcctagtgaatgtagatcaatttgagtccagctcctttgtgtgttttggccacatgaacttctggttgacacagtggtaggtctttatcaactttgttgcagtgaatgtgtgtttcatagtgaatctgtgttttcactctgttcttggcatggctgttactctgaatagagatgttctgaaatgcagaattgcagagtgaaaagaaaacctggacttaagcagagccaggtttaaacctgtgctttgctcagtggccacagactaatttcaatttgctgagtctcttttgcctcatcataaagtcagggtgccacagttgactttctagggctgagaaattaataaatatgttactgtacttggaatgattgctcatttcaatgtgtttcttggtatttacatgactcttgtttcctagttccaggcatgggtccaccactaggcataagagagtatgcaccaggtgttctgcctgggaaacgggatctgcctgttgaccctcgggagtttttactaggacatgcaccatttagacctccgggttcacttggtccaagagagtattttattcctggtgcccgtttaccacctccaactcatggtcctcaggactacccgctgccacaacctgctgcaagagacttactgcctcctggcccaagagaggaagccccacctgcctctccaagcagtgtccaagacagctcatcggctcaaaacccatcccttaactttgtttgacctctatcactgagtcagaacgagagaacgagagtggacagtgcattgttcattatagcaatgaatttcattggctttaatatctaaaagtttcttatacagagtttgtttttagtactaagctgctttggcagtgtttttttgggccaaacaaaaaatattattctctattcatagtaaaaaaaataatcacatgttaagctaatgtccttccaacttgaaatgtacaaaaaagaaatacctgtgtctagtttatgtagcatatgcaattgctcatgatttagaatatcctaaagtattaacatttcctgtagaaataaaacgtgtactcaaggatcacaaactcgtctttgttgctaaagttctttgtagtaatagttcataaactttgtttattagtattttccaagtgtctgttgattctttgggttgttttgagacttgtatcatttgggaaacctgacaactggccttctggaactctagtggtgagtgtgcacagtccatgtgacacagctacgttttccctaagtcaccagtgagctctacaggaattcttcctcttattcaaataagtcagcagccccacctatcttacctttctgtgccttcttgatgctcgatgcctgtttgggaacgatcttctgtgtagaagtttgcattagtatcaagaattatttgtagctggatgtggtggcgcacacctttcatcctggcttctgggaggcagaagcaggtgggtctctgtgagttacaagacaaccatggctacatagagcctgtctcaaaaactaagaggaaaaaaattattcggaccagcaatatggcccatctagtaaaggcacttactgccaagcctggcagctttagttttatccctggagccacacatgaagagaaccaactcccagtagttgtcctctgccctacacacacacacacacacacacacacacacacacacacacacacacacacacacacacacacgccttaaaatgtggagggaaaaattaaattacaattttttcacctcatgttttgttgcttttaaaaccatttttgtactaagggtgcgtaaaagatcaaaatcacatgccatgactgtaagatcatttctttttagaaatagacattctgttctctctcacatcaccttgcagctgagtttcaaggaatatgacaagcaagaatcaggaaggtgtcatgaggaagaatgattgcaaactagaaaacttacccatgtcttcagtccacaactatgggctgaaatgaatgatacagttgttttgagattgggtctcatagtgtagcccagcctggcctcagactctcagtgatcctcttgtttcatctcctgagaggctggaatttcaggcttgagtcaccttgcctagcttaattctttgatagatactaatgaaaaattaatattcaaatagtggtgcttttatttataaaccaggtttaagtccaggaactggtattgcatcatgtaaagtcctgtatcccttttacagtgtctttaaaacaactggttcagacaatatatagtaattgttgctgcacattatgtaagagctgtaacatgtaaagctgtaaaaggtggaaactgcttattgtgacactgtgttccctaaagtcttgtgaagtcatgatactgaaacctagggcatagtaggctgggattttaaagccacgtgggtctttcgaaaaatgagaaacagcttcaatgagaaataaaatcctcaacatctgaagacatggtatacaaagacaggctctctgaatgcagtaagttctgaggtagcctgtaaattctccagtaagagttagatatgcctagcccaatctgaaatttcagaagattttatataagaaaacaccacagaatagtgtatgtcattaaaaataattttttattctatgcatatgtgttttgcctgcatgtatgtaggtatactacatgtatgtctggttctcatcagtccagaagagggtgccagatcatccataaccagagttatagccagttgtgagccgccatgtgggtactgggaactgagccctccctggtcctctggaagaacagccagtgctcctaatccccaaactatctcttacacccctagcatatgctattttttaaccatataaaaataagattgaattgtaaatacagcttctggaatgcacctaccaacctcaagacacaaaatcattacattcatatcctgcctccactatttcaactacctaagtttagatggcatataaagattttatcagctaagaagacaaatagtaaagctaaggaacaccctccacccaccttttccaaatgaaaatggggatatatctcctctaaagccctgtggttgtcctgtcgaatacgataaacaatgtcagaaagatgtagagaaacagtgtggttatctgggcagttctgagccattcaccactgccttcccttcacaccatcggattgtaatcctaggctacaaaagcccataataagccatcagtctaaggatggcacagaggacatattaccacatttgaaccacttttccatttccaaagttcctatttcagaagttccctccagctagctaacatttctgggttgagtggctaaactatcactaggagcagtacctcagcctcaaaagcatttctcttagaacacaggctgtcttttttagggcagtttctttcactgcaatggaaacttgtgaaatggaatgccctgtgttaactggtttaagacaatcttgtcaatcaagtctgaattaaagccaagcttatcacaggatgttcccttagctctcttgaaccctgatggcaggcacctgtagttcattgaaacacagttatgagaaggaccggtgctgtggcacagagactcaccactttgctatttgtattatggtctgtgagaaaaaagaaaggacaatgtacagtctttgctacattttaataatagtaggtttgaagggatttttttttttaggtctagtcaggaacatcagacacaagttactaagtgaatccccaggtacagagtactgcctggggtactgggtactctctaggtaaagagtactgcccggggtactgagtactccccaggtacacagtgctgccaagcaccttagagtcttttcatgacacagatttgtggctcttgcctttgagaagcttacagtcttgggatccaaaacccaaagcttaggattcagataatcagttaatttaaggcaaattcttaatctcctagaactactatagtcagaattattttagcatttggaattaatctgatcaagattaatttggctgtggattttttttttcaggttgggcctgaatagttttttattaacatccatctagtaaacattgactagtaggtgctgaaagtcaagactagatctcttgaagggcaaggttaaaacatcttctttgagactacttacttaaaaagccaatacactgaaccctgtgatgaggttatactatttaagagcaggcccagtcctgacagtgcagcccactcaagcacttctcatcagaacatgaagattaaaatgtgtgggttctatgtctaacccacagaaagcccctcaatctcaatgttctgtgtaacaactagccatcatgtgctatgtgaaagttttatttatgcctcgttacatcaaaggtaaatagtcaatttaaaataactaatgacctgcatattttccaaaggaatgcatgactgtatatctaaataggaaataaatggcaattctatctacctatattaaaaaaaataaactatcttttcatattttgcatactaaggagaggtatgcggtcttaaggtctcacaatgggttgtcaggaagcagcagttatccgcagtattttaacatctgactcaactcttcctaaatgatgcaatttaaaagatactgtaaacacatttaaaacctggagttactctgagatggttccagcgttaaccccagaatctaccaggaagaatagcagtgtgacagagaagaacagataaccccttggctatacatgtgttcatgtcaggaagccagtcttgtcatccaggggattctcatctggccaggccacacttcccatcaggagatctatggcattctggcaggatacttgtaaagagtaactacaggctcccagaccgactttcctaggcaatgtaactagtccaatcctgctcagcaattctccccacctcagcccagaatgttgcatattggagcaaaggtgagcagaaatgtaaactctagcacattcttattgctgcattgtctgaagttcagcacatcgaccacaacagtactacctgggaagcaggggaggaggagtggtaatgagaaaatagacaattaattgcacaattaatagaaaagtaaaaatgtttcaaaatctacaataaacctgtatccaataggttagtgatgtgctgaacttttgagttctggggtccggctttgtaatggacttgctggccaactggcatgggtaggactcatttcctgcctgttgaagagtgatatgctacacagagctatgatggtttctgagtggtaaaattcacataggttccaggttatttgtatcaggatcattccttgtgcaaagtttgatgtagatgaagataaagtggtttcttggtcaataattgtaatttttttcttttaaagtcagtgggtttcttgtatctggaaccacaacagaaagattattgtttaaaatactctgattgatccccaagttccatttgccatgccccaaacttacaattctattacaattggcccaggtttaatttcatccatctccatgaaggcaaaacacttggtgctggtgaacctctttttaggcttgtaatgtttgaattcaaagaagatggctgcacctatgaaacgacaggcagccccttccacgttaattaactttcattactcaccagaagcatatgaagaagcaatagtttgaataatccacaaagtaacctgttaaatactgtctgctactatgagtagcaaccccaaattctattctaacatttctccatgtcaactaattctacaaagtcctgagtgagacggactcaagaatgtaaatcactaaagaacacagaatagggctaagatggctcagtgtgaggactagaatccagattccccagaacccatataaatgacaggtggcggtggtggctgcctgcaattccagagtttggagggagaaaccaaaattcctgaagcaagttggttagctagactagttaaatcagtgagctctgagttcaactgagaaacatgtctcaatgaataagaaagagtaattgaagaatactacggccagccttgggcctcaacacacatgtgtacatgttggtgcacctgcacacacaggtgaagccacacacatgacctctaagtacactattgtgttagatacttttatgtcaacttgacataagccaaggtcatctgagaggaaagaatctcaattaagaaaatgcctccaaaagatcaggttgtaggcaggcctgtaaggcattttcttaattagtgattgatggggaagggcccaacccattgtggttggtatcctctctggactggtgctcctgggttctataagatagcaggctgaacaagccatgaggagcaagccagaaagcagcattcctcatggcctcggcatcagctctacctccaggttcccaccctctttgagttcctgtcctggcttcctttgattatgaacagttgaaatggaagtgaaagtcaaataaacacttccctccccaacttgctttttggtcatggtgtttcatcacagcaatagaaacccaaactaacacaacgacacacaggaaaaatttcaaaacaaaacaaattgcagaagaggaacagagtccacaggcgtaaagtgcactagacagcccacagcaggggtaaagtgcactagacagtccacagcaggggtaaagtgcactagacagcccacagcaggggtaaagtgcactagacagcccacagcaggggtaaagtgcactagacagcccacagcaggggtaaagtgcactagacagcccacagcaggggtaaagtgcactagacagcccacagcaggggtaaagtgcactagacagcccacagcaggggtaaagtgcaccagacagcccacagcaggggtaaagtgcactagacagcccacagcaggggtaaagtgcactagacagtccacagcaggggtaaagtgcactagacagtccacagcaggggtaaagtgcactagacagcccacagcaggggtaaagtgcactagacagcccacaggggtaaagtgcactagacagcccacagcaggggtaaagtgcactagacagcccacagcaggggtaaagtgcactagacagcccacagcaggggtaaagtgcactagacagcccacagcaggggtaaagtgcactagacagcccacagcaggggtaaagtgcactagacagtccacagcaggggtaaagtgcactagacagcccacaggggtaaagtgcactagacagcccacaggggtaaagtgcccgtgcattagttagactggaagtgaaggttccttttaaaacattcaagctcaaccagctttgcttcctcctgaaataacccccaaatgcaaacaacaaagtcatgtgctattaaatgttacctaatgcctctttagagtccaaagctgtgcatttacccatcacctacacccacatgtgctgtggatggacgggtataaaggcaacaataatcaagcattcatgagaaagttccatagttacacatctccaaagacagacagataagctctgaatcctgaaggggaaaacagctcagattatgatataagttaccagtgtagccccaaactgatttctaaaaaaggcatgaaaaccaatgaaagttgatgtctcactcaactagttgctatttaattctgctttaaccggggtggtactggatcctgcctttaaacactatggtagacatctactttagtgacaatacagcttctaactgatggtgtttaacaatgctctcaacagccaagtgaacagtcctggcacttggacacagacagagtatctcacaaatcaagcagaaatgcccagtcactcaagaaacaatggagagagggagaaacaggcacacttagcctgtacttcctcacacaaaagcatctcaatagttgggctactggggatcaacttccctaagcatagaaccctatcagatccacacaggtatattatctcttctcattcctacagcaatagtagaaacatctaattatcagaccatatttcttactctcttcagtattcagtattctcttactgtattcagagggaatacatctttttaccatgatgtatatgaggccaaaaaaacattaacaaagttgtgcttggaatcctaaggccaaatatgtcaccattgttctttctcatctgcattatcagaaacaaaattttcactgcagtcttggtatgcagagttctgtgtgccacacatttgttaaaaatgtaaaattaggatatcctaagatgactgaaaggcttatacccatgaaatttccttagcattagcatcacttagaaccacggtgactaatattaagttcaaagctggagaaaaagaatggtgaagtcctgaatatacttcaacaattcatcagtcatcaggaatagcaaagcacagtaaggaaggttagcccatggactacactgtccttcacatcagaaacaggtctcaaagcaatggggagaaggcacactcagtgttgcaatttcttccttaagtaccccgaaccctctgatacacacccttctaacccagagtttcaagttctggagtctatcagaatgacctggaggactttaagaaacacactgctaaggctgcaccatggctcatccaccagggctcaggggctgcctctgctgcagccgtggtttaagaagaaaagcatcgacacgacagaggctgaggcactcgctttatacccatgtcctacagagcttagcatctcaaactgcagctgaggctcaagggacataagggactctgaaggcttctctgtagagagcaccaataggtcagtgggcagatggcaactgcaaggatttattgctaagacctgtgctaggctggtaatgcaacacttcagtgtgacaaaaggtggctttctcttcccaccttccctccaatgaactgcaagctctggaaggtttcagctcagtgtgtcccactggaaggaaggggtccaaacaccattaggagttccagcttcccccacccatcagaaagagaaaaactgcgtgcgtgcgtgcgtgcgtgcgtgcgtgcgtgcgtgcgtgcgtgcgtatagtaagcatgcatataggctcacgtcaggcttttcctcaatcagtttcccacatcactttttgagacagggtttcttactgaatctggaactagcctggctgagcagcaaacctcatctgcccttatcttccagcactggcaagctgccatgcctgaattttacatgggtacagtgaacctagctcaggtcctcccccactgagccatctcccaggcctaaaattttactattgaacaacatattctagtgttttaatacaaccagataacaaaccacctaatttcaagatttaaaaaacattaatatttagatttcatcaaagcaactaaccaggtgacactgacttctgccaggcatggattatgatgggatcactgtgcacaccctcccaaatgagtgctgtccacaggaaaacaaagatatggtcacaaacctttggttaatttttcaacatgcttctggagctcaatgtccatattaaaatgaacatatgtatcttcttttcttgaagccacaggagtatcttgtacaggagttaaatctatgccattcaaatctagagagaaacaaattcccatttaggggcaatcacatttaagaccaccaaaggccacatttcctgcagaggtgggatgggggagagattccagggattcacagggatgcctccctgtatgaacaggggcttgggaactgctgctacccatgggtgtgtgaaggaacagaactgagaggctgggagaccacagggagggaaattaagtttgcaggaaatcaaatttgatctttaagaggggaaagaacttcctgtttgctgagggcatagaccactctattatgtgtagtaagaatgcagactgaatacactttgctacaatgtggctctcagcctctattttataacactgatcaagggcaaggctggaaaggctttaagtctataattaagtcagacttcctctgcagtactcaagtcagatgggcatgagagctgccaaaatatccctttcatcagtgaagaaatttgtaagtagtacttacattctggttatgtttcccaaaacataactgatttaccacaaccagatggtatactaagttactgagtatggctttaatttcctgggtccaagaaccccacttaatcaaattctgcattaggcttatttaccaaataagtgtttatatatttattatacaacaaagatgctttagtaacctacagtaatttggtacaactgattattggagttcttaaagatatttacacaaaatcctgtttcagttcaacaaacacgcaaaggtaatttaacacctaccacgtatcattcaatatttaagttttaccaagtattccctgaatgttatatcattttgcaaatggtctttcatacaatgtataaagaacaaaaatactttacacacttgatagctgtctatctcttaaagcagtggttctcaacctatggattgtgaccacctttagggacatcaaacaaccctttcccagagggcccatatcagtgatcctgcatatcagatatttatattatcattcagaacagtaccaaaattgcagttatgaaataggaatgaaataactttttggttggcagtcacaacatgaggagctgtataaaagtaaagggtcacagcattacgaagctgagatccactgccttaaagtatttccaccactagtgctgtcaatcatggtctatgcttattaaaattttctctgtggctaaattcctttttattttaattgttactaatgaacctttgggtgtgaatttctaaagtgatgcaagtcgcctcagcccacatctggttctttggttagtttcagactacagcttaatgttaaccacttacattaactgtagttatttcttgataatgatgactatacccttactgattcaataataactgttcttactaatttttttcaaatggggtctcattatgtgtcccccaaagttgggctcaagtgatcctcctgcctcagctgtttagaaactgggatcacaggtatgcttcactatgcctaacacctaagaaaactttttaatgactaagtgctttgaaaataaagtactatataatatgtataaagtactgtaaaacaggtataaagtattacatgataatatgtataaagtactgtataataggtataaagtattacatgatgatattataaagtactgtacaatgggtataaagtactgtataatagtataaagtattatatgatgatatgtaaaaaagtactgtataataggtataaagtattacatgatgatatgtataaagtactgtataataggtataaagtactataaaataaggaggcaacaacaaaagaattcagccatgtggattctctgttagggacaggaaaaaaaatggccagaatattcacactttcttactctgctaactttctttcctgtcctgcaaggctctcagagtctggacatacagaaggacccactcctggcctctactctaacccttcactgcagcacccatcttacagaaacctgctgtaggaatctgagggtggaggaggactattttctaattctgtatcctggaagctgtctctgctgttaaggggagacatgtgcatggctagacagctccctagatgggtctggagtaagaaacagaaacagaaacaatgacaagctcaaaagcaaaagtgagtctaagctcaacatttaaaaatatgtttattaagtctatcagaggtcccccctccaccctttgccctctgcaggctgcctgaggtgagtctgggcgctgctctgcccccaacttcccccatcattccctgctcccttcttcctgagcctccccctggacaagagtggacctgcccagaacggaaggcccaccctgagtcgaccctctgccctctgccctctgcctgctgcctgagggatgggaagacgacagaataagaacacactcaacaacagaaagaccaacatgacaccaccagaatctagggactccacaccagcaagaactgaaaagcccaacacagaggatgaagaagagatggaccttaaaaattatcttatgaagatgatagagacaattaaagaagaaacaagaaaatccctaaaagaaatagaagaaaaaacaagcaaaaaattacatgaaatggaggaaaagaaaaaccaaaaaattcaagaaataaacaaatctcttaaagaatctaaagaaagccaagaaaaaacaaccaaacaagtgaaggaataaattcaaacagttcacagtttgaaagcagaattagaaacaataaagaaaacacagaatgaggggatgctggaaatagaaaggctggataaacggtcaggaaccactgatgtaagcataaccaatataatacaagagatggaagagagaatctcaggtgctgaagactcattagaggttatatagttatctatcaaagaaaatctcaaatccaacaaatacctaacacaaaatatccaggaaatatgggacacggtgaaaggaccaaacctaagaataataggtatagaagaaggtgaagaaattcagctcaaaggtacagaaaacattcaacaaaatcatagaagaaaacttccccaacctacagaaacatatgcctatgaaagaacaagaggcttacagaacacaaaataggctagaccacaaaaagaagtccctcccgacacagaaaacttagagaataaagaaaaaaattaagagcagcaaaagataaaggccaagtaacagataaaggcagacctatcggaattacacctgacttctcaatggaaactttgaaagccagaagatcctgggtagatgttctacaaacactaagggaccatggatgccagcccagactactgtatccagcaaagctttcaatcactatagatggagaaaacaagatattccatgacaaaaccagatttaagcaataaatatccacaaatccatccctacagaaattactggaaggaaaactccaacacaacaaagataactacgctcaaaaaaccataggcaatagataatcccactttaccaaacaccaaaaaaaaaaaaaaaagggggaaatccacacataataacaccaccaccaccaaatccaaaacaaacaaaaatcaacaatcaagggtcattaatatcccccaatgtcaatggtcttaacttgcctataaaaagatacaggctaacagaatggatactaagacagaatccatccttctgctgcatacaagaaacacaactcaacttcaaagacagacgttccctcagagtaaagggttgggaaaagaccttccaatcaaatggacccaagaaacaagctggtatagcaatcctaatatctaacaaattaagacttcaaactaaaatcaatcaaaagagatgaagaagggaatttcatacttatcacaggaaaagtccatcaagatgaagtctcaatcctgaacatctatgccccaaatacaaaggcacccacatttgtaaaagaagcattaataaagctcaaatcacacataaaaccacacacacttatagtaggagacttcaacacccagctctcaccactagacaggaccaccagacagaaacttaacagagtaacaaaagaactaacagaagttataacccaattgggtttaacagatatctatagaacattccatccaaacacaaaagaatataccttcttctcaacgtcacatggaaccttctctaaaattgatcataaacttggcaatgtagcaaacctccacagatacaaaaaaaaaaaaaaaaaaggaataaccctggatcagaccaccatgctttaaagttagaattcaacaacaacacaaatttcagaaagcctacaaactcgtggaaattaaataacgcacaattgcaccattcctgggccaaggaagaaataagaaaagaaattaaagacttcctagaatttaatgagaatgaagacacaacatacccaaacttatgggacactttgaaaacagtgctaagaggaatgttcatagcattaagcgcccacatgaagaaactggagaagtcacactagagaattagcagtgcaactgaaagctctagaacaaaaggaagcaaactctccctggagtagacaccaggaaataatcaaactaggaaaacactacaaagactcaatgaaacaaagagttggttcttcaagaaagtcaacaagatagacaaacctttatccaatctaaccaaaaggcagagagagagcatgctaattaacaaaatcagaaacgaaaagggggacataacaacagacactgaggaaatccagagaatcatcaggtcatactttgaaaacctgtactccacaaaactcaaaaatctaaaggaaatggacaattttctggataaatatcacttaccaaaattaaatcaagaacagataagcaatttaaacagacctataacccctaatgaaatagaagcagtcatcaaagtctaccaaccaaaaaacaaaagcccaaggtcagatggtttcagtacagaattctaccagaaattcaaagagctaataccagtactcctcaaattgttccacacaatagtagcagaagggacattgccaagctctttctatgaggctacaattacactggtacccaaccaacacaaagacacagtgaaaaaagagaattacagaccaatatcccttatgaacgtcaatgcaaaaaatattcaacaaaatactggcaaatcgaatccaaaaacacatcagagaaatcatccaatatgttcaagttggctttttcccaggaatgcagggatggttccatcaatgtaatccaccatataaacaaattgaaaaagaaaaaccacatgatcatcttgctagatgacgaaaaagcctttaacaaaatccaacacccttcatgataaagatcttggagagatcaggaataataggaacatacctaaacatgataaaagcaatatacaacaaaccaacagccaacatcaaactaaatggagaaaaactcaaggctattcctctaaaatcagcaacaagacaaggctgtccactctctccatatctcttcaatattgtccttgaagttctagctagagcaataagacaagaaaaggaggtcaaggggatacaaattgaaaaggaagaagtcaaactttcactatttgcagatgatatgatagtctacataagtgacccgaaaaactctaccagggaactcctacagctgataaacaccttcagcaaagtggcaggatacaagattaactcaaaaaaaaatcagtagccctgctatatacaaatgataaatgcgctgagaaagaagtcagagaaacatcaccctttacaatagtaactaacaacataaaatatcttggggtaacactaatcaaaaaacaagaaagacctgtatagtaagaactttgagtctttaaagaaagaaattaaagaatataccagaaaatggaaagatttcccatgctcttggataggtaggatcaacatagtaaaaatgacaatcttgccaaaagcaatctacagattcaatgcaattcccatcaaaatcccaacacaattcttcacagaccttgaaagaacagtattcaacttcatacggaaaaacaaaaaatccaggatagccgaaacaaccctgtacaataaaggaacttccagaggcatcaccatccctgacttcaagctctattatagagctatagtcctgaaaacaacttggtattggcacataaacagacagcttgaccaatggaatcaaattgaagatcctgatattaacccatacacctatgaacaccttatttttgacaaagaagctaaagttatacaatggaaaaaagaacgcattttcaacaaatggtgttggcataactggatttggacatgcagaagattgcagattgatccatatctatcgccatgcacaaaacttaagtccaaatggatcaaagacataaacataaattcagccacactgaatctcctagaagagaaggtaggtggtaccgtcgaacaaattggtacaggagactgctttctgaacataacaccaagagcacaaacattgagatcgacaattaataaatgggacttcctgaaactgagaagctcttgtaaggtaaaggacacagtcagtaagacaaaatgccagcccacagaataagatattcaccaaccccacatctcacagagggctgatcaccaaactacacaatgaactcaagaagctagccaccaaaacaccaaacaatgcaattaaaaaatggagtgcagaactaaatagagaattctcaacagaggaatccaaaatggctgaaagacacttgagaaagtactcaacatccttagccatcagggaaatgcagctcaaaaccactcttagataacatcttactcctgtcagaatggctaaactcaaaaacaccaatgacagttcatgctggaggggatgtggagaaaggggaacacccctccattgctggtaggagtacaaacttgtacaaccactttggaaatcagtatggaggtttctcaggaaaatgggaatcagtctacctcaagacccagcaattcctctcttgggcatgtacccaaaagaatgcacattcatacaaaagggacatatgttcaactatgttcatagcagcattatttgtaatagccagaacctgaaagcaacctaaatgcccctcaactgaagaatggatagagaaaatgtggtacatttacacaatggagtactactcagcagaaaaaaaacaaacaaaccggaatcttgaaattcgcaggcaaatggatggaactagaagaaaccatcctgagtgaggtaacccagtcacaaaaacatacacatggtatgtactcactcatatgtggattttagacatagagcaaaggattaccagtctacattccacactgccaggagttaggaaacaaggaggaccccaagagaagattgtatagtcagtcccttgaagaaggggagggggacaagaacccctgaacaaagtgggggcatggggcgaggtggagcggaaagagttgggaggggaagaaggagaacaagaggactgagacaggggaggagtagaggagaacaagaaaggagatgccttgatggagggagacagcccaggtatagagagaggtctggcgcaggggaaacgttaggggatccacagggatgaccccaactaagaatccaagcagtggtggagaaaatgtcattgatgcccttcccttataatgagattgatgtctaccttggttaccattcctagagccttcatccagtagctgttcgaagcagaaacaggcacccacagctaaggattgaaccatgatactggaatccagttgtggagagggaggagggatgagcaaaggagccaagatggtgctggagaaacctgccgaaacagctgacctgacctagtgagagcatggagaccctagtcataaagctggggaaccagcattggaccaaaacaagccctctgaatgtggatgccagctaggaggccaagacctctatgggacctctgacagtggagccagtctttaacgctagagcacaaatggactttgggagcccattccctatggagggatactgttgcagcccaggtacagcaaggagggcctagaccctcccccaaacgatatgacagactttgaaggtccctggtggagggcctcactatccctggggaggagtcgggggatgggttggagctgttggtggggaacatgggaggatgggagggcgagggaatgggggtggatggatatgtaaatatgagtagtaattaaagaattaaaaaaaaaagtctatcagaagtgttcactgaaggaataaagatcaatttcagggttcctatcattatagaatgaattaccattagctgctacagacataggagccatcactctaggaacaactgttcccagtagaaagcagggtgacatctgcagaagggaaaccactcccagagctcctcacccttcacgctgactgtaatgtaggggtcgatgcactgcccagcgtccttcagaccgattttctcaattctgatagtgagtaacgtcattcctggctccgacggcaaccgtggcaatagagtccctggcaacagagaaaccataataaaaactcggccacaaagaattccagagtgaacattttagcaagcagaagagacacaggcttccttgtaacttagcaaccaggcaggcattgcacattttgctttctagcactttcaaacactgtattattccttttttgtttttaggctgtccttaggtttctgtgtatggagattacaggcaagtgtcaccacacctagcttggtgttactctctgtgaacaaatatttaatcatatgcgagataaaactgcactccatactccacaaacaccataagagcggaattattagggatagtttgttaaaaattcatgttactcatggaagcccaattctaagatcccacataatacatatattcaatgcactcataaagatatatctcgcagaaaaaagcaatggaatcttgaaattcgcaggcaaatggatggaactagaagaaaccatcctgagtgagataacccagtcacaaaaagacaaacatgatatgtactcactcatatatgaattttagacatagagcaaaggattaccagcctacaatcctcttcaccaaagaaattaggaaacatgaaggactttaagggataaataaatgaaccccaggaatgggaagtggcatgaactcctgagctaattgggagcatgagggtaggggagagggagctgccacaataagagcaagagaagaggagtagaggagagaaaatggaggagcaaaaatattgagttgggggaagaatagaggagagagagcaggatgagagatatcatatcagagggagccactataggtccgagaagagaactggaactagggagatctccagagacctacaaggatgacacgatctgacaatccaggcaatggtggacaggataacctaaaagcccttcccctaaaatgagactgatgactactctttatgccatcctagagccctcatccaatggctgaggaagcagagacagacatccacagatatacactgggctgaaatctggaatttagttgaagagagggaggaatgaagagcgaaggggtctgtaccaggttggagaaacccaaaggaacatttggcctgaacaagggagagcacatcgaccccagatgctgtctgggaggccagtacaagactgatccagacccctgaacatggatgtcaataaggaggcctctgcactccagggagcctctggtagtggattagtatttttccctggtgcaagaagggactttgagagcccatcccacatgaagggttacactctggccctggacacatggggaagggcccaggcccagcacaggaagatttggtggacactgcagagccccctttgagggccctaccctgcctggggagtgctgggtggatggggtggggggtatgttgggggtgggggaggagggatggggtgagggaagggagagggagagagagagaagggacttacatgtgaaacaagcttgttccctagcttgaaaaaaaaaaaaaaaaaggttgggtcttagaaaaaaataaataaaaaaaagatatatctcagtaggaacttgtagaaaaaggacagaagacctttgaagtattttctgttattctgaagcttaagaagtttgagagtagaccagaaacccctgcagttactaccaatgtatagttcagcgttcctagattcagttattaggtagactactaaagcctaatctcctactgtattcctcaccctattctgtacgattattcttagcagttagtactgcagggaatggcaacagaaagcagcaaaagcaatttgaatgtgtcaaacattcccattcaccaattacattttaaatataaagactgggctggagacatggctcagtgctaagtgtgctttctccacaagctgaatgtgaatgcccagcacctgcacaaaaggctatatacatggcggcacttgaccagagcattaagagcacaggagagaagggcagaggagtcccaatcccaaatgctaagactccagctcagaccctgtctccaggcaagaagcagggggctgctgctgaacacacttcaaattctgatctggtctccaaatctgtgtgcatgggcaaatgcatccaaaagttaggggcatgtaccgggcacatatataccatacacaaccccaccccccaataactcaaagcccactcaaaagaatgagcattccaaccctcaagaaactagtcacttttaatctagtgtgtgtgcagtaagtgaaaccacatacacaacatgacacttgcatgggattttggttggaatctttcctttctgtttaacaatgtactatcctaacttttagtaatgaagaatccagagaacatgatctggtaccttctaaaatgagcatctaatagacaaggaacaggtgtgaggaaactggacatgggggccatggaagtgctgtaaaactggaaggtcgtcatgatgtcatcacttcataaatctagaatttataaattctagatagagtaacaattttttgtgggtctggtgtttattttgggggacagggtctcatcgtgtagcctgggctgacctcgaactccaggcaaccctccaagctcagcccccaggtgctagacctacaggcacaaacaccacaggtagatttccatctaccctgttcatcttataacacctgaactgtgtgagcagtatggctagtgctgagcactccttccttctgacacctataattttggtctatagtaggtagaaaatgactccgtgactaattaccaataacagccatgtgtgctgaatctctaagtagacattttacctctcacaaagctgccacaacttttttttccctgcattttggatacacattttattaaccctcacagagtacaatctttttatcatgtctctcatacaccatatactccaaaaataatgcatctttactatgcccatagagatgaactagataaagactgtcttctttgtgcctcttgctctctggctgccacaactttttacagcaggaataaaacactgcctatgtggccggcagcatagggaaaggagctctggaatctgcacccattttcctctgatttggtccatatgccttcccctgtggctaactttgctcctgtgttcttgcagcatcctatagctgtgagtcctgctgagtcactgagcatgtgttctgaggaccactaacacagatgaccctttcacaccatgagctgactgacggtggcccagccaaggaagtttgcttacagctggcaagggctctggagagattttcttctcctctagcaaacatcaacacaagttccatgcacgcgccctgctggataaagcagtgcacatgctgtgtaaggatgctcaccaggaactcgagcagaaaaagaatcaggaggtcctgccccagctccaccttcttcatcttcttcaaattccaaattctcttcttcaccaggtgctaaaatccgtctacaaggaagagagagaaagaaactaaacaatgagctacaacacttaatacaataaggcctcacagatgttccacaggaagcagagttttgtaagaggctgacatattgttaccaatattgatatcaatcatatcaaagacatccaagtggataaaacaacagatgaatctgaaagacaggtgtacagaagacactaagagaagaagatgaatatgaacacttatttaccttaatgggatgggctgaacatcaaatgggaattctttgttatatgtaagaatattcttcaggactataataaaaaagacaaagaaacatgaattcttctataaaaactaagctgtagctcagagagctaatttgtagtaagttttatcatgcacatttagacacattttaaattcccagattatcattccagagccgttgtacttgtttgcagaaggtctgagaaaattaggcccccaaaacttttcctactaggtcctgggtgagatgcagggacctctctgtactgaaggactgacattaaaaatgacagaagcatatcttactctgtcttgagttttctcgtgaatgttaccaaactgttaaggtttgttttggcagtaatacatctcgtattccttttatgatatttatagcttatgtctatctatttatagatatggacacagtaaagagaagtctccaggcaacatggtacctgttgtggtttctccctttgggcatacaagcttagagggagatgctctgtaatgctgctgtggaactactctaaatatgtaacttagtgtttcacttccaaccctgtgggtcccagtaacaagctgtaaatgacaggaaggtgaatccacagcaggaaaaaggcaacacaaaaggctcctgtaaattagtgttcaacacacccagcatttaactttgcagtcctatagttcagagctcaaagaagtagggcatattggcatatagcatatagcctctaaaggagggcatccagaggacacaggttgcaattgcatgacatgctccaaggattgtcagtttttatccaatttcttatatgtgtactcatagaatccagtgtgaaaaaaatcagaagtcacagttttctttggtttgtattatctctctttctttagctcttacctctacccttccgccatcttcctttttctcaataactgtgcacttagtgaccaaaatgttttagactcaggatatactgtgatcaagaactcctaaatggatcttaaaccaaacttaagaaaaacagacagcacgcacatcaaccagtacagcagataacacacaatgtggggagctatcactggcagcacagaggtccctgggagagcaacacatctactttactctgtcttcagcagacgtcccctcaacagcatcaaatcggagggtttgtaacagaaaggctattcttctgctgttcctcttctgaccttagtacagatactaacattctacaggtctatacacagtacagcttaccctcaggggaagtcttcaaacacgtatactggctgggggaagtttgaggctgagatacacactcatccaaactcccatttggacctttgaccaaactcaagaaaagcagatcatggatgccatcaagtagacaagctaaggtgcaaatgtagtcactgctaggatggacacacagaaatctggacagagagacagtggagtagctggagctgtgacccaggatagaagcatcacccagagctactctggggttggaactttccagaattggagaagcaagagcaatgaagattcagagaaggaagacaactttgggatgggggtaaaaggcttgctcttttctgagacagagtttcactctatatcccgacctggcttagaattcaccagggaacttctggcaatcttcccacctcagtctcttgaacaggcatgtcccaccacattcagcttggatttgacctcttcaagtaatagaacgtttacaaggaagaaaaagtatcagaagaccaaagtaggtttacatgaaatgtcagccccacaattccaatgacagatgcccataactatgctgaagtcatgtgcattactcagttttcccagtcctaaaatgggagtgacatttccttcacaggccactgagggaactaaaatttaacaacatccatgacaagttttaaagtgttgagcacaaccacactcagcttcaagtatctgcactttataaatgtctttttttctttttctttgtttttaggtatcagtgcttaaaaagagagtaagtagaaacatatacggttatgcggtaattaatatttgtcacggttttccactgtgactgactagaatcctagtgtctcctgcctcacagggagttctgccttttcaacatcccttctgaactttatgatttatgattaaactgttgatgacaacatttgtcattaatattagatatgatacagaaaccatattgtataataataaaaggagaaaaggccaacccttaaaatacatgaaagaagttgaaagctacattagttataaagaatattttccctcaggagaatgagaggacatagggtttaatgtagcccaggctgggcttaactcactacaaagtagaggctagacttagattcctaatcctcctgcctctgccttcatagtggaatgattacaggcatgtgttgccacatgtggtttgaaagaaaatggtgcccaaaggaagtagcactattaggaggtatggctttattggaataagtgtgtcactgtgggggaggactttgaggtctcttctgctcaagcttccctcagtatgacacacagttgacttcctgttgcatgcaagatacaggactctcagttagctacttctccagcaccatgtctgcctgcacatggccatgctccccaccatgataatggactgaacctctgaactgtaagcaagccaccccactgaaatgttttcatttctaagagttgccacggtcatggtgtctgctttttgtaaacttcttttttcaggtatcagtgctttggaaacgaaatatttgggggtggaaagacagtgtttaagagaatgtgctattctttgagagtaccacagttcagttccgagtacccactcaaggtggctcacaactgtctcaacgtcagttccagagtgaggccatgtggcctctgaaggaatatgcactcctaagtacacaccaacactaggaatgccccagtggcctgcttccatcagccaggcctcactgttcttttgcttattacattttatgtattttgtgggggtcagagaacaacttttgggagtaggctctttccttccaccatgtgggtcctgggaattgaactcaggtggtcaggcttggtagcaagtgtctttacattttgagacatcttactagctccagtccttactttttaaaagtgttttataatctcacagcagcagctgaggaccattcagttttatgtacttgaatcaatctgacaccctcagtgtcctcttctactgagaatcagtcttactcatggagaatggacctgccacccccttgcagttcaggccctaaaaaatgacacatgtgatctcatagtaacgtatcactttcatggtaggcaaaaatggggaataatttcattctgaatggttacttttttaaactatggaagaaggcttcctctcaagacattcaaatctactgaatattgcacaaatttgctgagttcatactataaacaatgcactgcacagactatgcataggaaagtcaaaggctgtttgtgcctgctctgaagaacagaataaatagaaatgagagtaatacaggacagactctgacaggatgtaaaatcatcccttaacggagacgaggtagtgggtccctgaggctaagaaggcacagaaagctttcaggaaaagtgatttctgtggtgttcggaaggacaggttaatggaaaggaatattattggtggtgaggggagacaggctggagtaagcagtgtgctctgaggggtaacataaagattactagagttattacaatcacaggtatgaacttcatacaggactgccaagagatttaaaaactttgaaggaaagaattcattagcaaagtgaatcatactgaaagctacatcattcattttccacagaagaggcataaccaagggaaagcttgactaacactatttcatctaaaatgtagttaaacactaagctgcagaaagtacttctgatagaagtaactcataagtgtccaacctttataagctaaaaaactacaaagtatgtcctactgagttaccgtatacatagctatgctgcttctagaagcaacaaaattaaaatcactgaaaagtattgagaaggggccaacagatagctcagtgggtaaaggtgcttgctgccagacccaaggacccaggttcaatccctggaacccacacatcgaaagaaaagaaccaatttctacaagctgtcctataggttatcctctgatgtctacccaggtgctgagccctctactctctagatagacagccagatgattgatgacagatagaagatagatagatagatagatagatagatagatagatagatagatatgattgatgatagacagatgattgatgttagatgatagatgattgatgatagatggatatagacaggtgtaaaacaactttgtaaagtattaagaaggaagaagttcaaatgaaaagcattatataagttcaaaatataataaaatgaaggtgaagttaatggtaaactactttaattcctatactcgagaggttactacaggagaactgagtttcagacaagcctggctacacagcaaggtcttgtcatcttctaaaaatgaagcaaaataaaataaatttaatatcactatatttctattcccactgtgactctttaaaatagaaacaaaagccttaagaaaaaagaaagcaagaagaacagaaaccactggaggtcttagtgttaatattccactaaggcaggaatcaatcagaaaaccactaaaaagatcttagtgcaatatcccattaaggcatgaatcaatagtttcccacaaacttgaactagaaaactatgacattcaggacttacatatctcaaacccattcctgatatttgcaagcataaggtcacagacaaatgtcagaactgtcattagcaaaaagcagctgagagaatttctctgaatgccaagtcttatagctgatactctttaaaaaaaaaaaaaaaaaaaaaaagccaaccaatccaagatctttgaggcacttggaggacttaacagaggatgattataaagagataataaatgcctactgctaaactcacaatttttatggctatcccacttaccataaggttccccacctgccctatcctttctccctctgcccctcctacaatgatagagaactaagtcagggcagagccttgttcctgtaagccacatccccagctttcactaagtcttaacttgtgtttgaagcaaaccataaacaaaacccctaactgaaaatggtaattgtaagaagccaaaatcctcctcctcccccttttatcatttaagaaaaaagaaagaaagaaagaaagaaagaaagaaagaaagaaagaaagaaagaaagaatttttctgagacccagccaccaggcatactgactacagctgtgacttgtctgtctgtttccttgtggctctgggatgcctcacacgtgctgagtatgcactcattcctgacaacaccagccccagagctacactcttctaattaaagccatcaaggtgctttgttccaaaatatcttatataaagccagtcatggaagaccatatatgattctatttgtgtaaaatgttcagaatgggcaaatttacagacaaagtaagttagtggtttcctagaactggtaactggagaaggtcagaagtggataaggaaatgagtgatgccagtgggcacagggtttctttttagggcgatgaaaacatcccaaagttgactgtggcaatggtgcactgtcagggcaataaaaagcagtaagcatacactttaaattaatgaattttacggtatctaaacaacattcaatgaagctactaataaaattatatcaactatttgttaatgcttttttaaagaaaccataaaagttctatgaatgggaaaatgtgatcagaaaaaatttttaaattttacattagttgattggcattcctatattcactgagaacaggtaagaactacttagaaatatataattacagttcttgtaataaaaaggttatggtctgcattacaaaaagtagcaaaactattaaaatgacacaattcatcataattcttgccatatgcagaaggatcttgctctgaagagatgaaatatgatcatctaacaattgtggaaaagtcaccagaatcgcagcagatctgtgttcctgtgtttttgctgcttctctctaccaacccaaagaaaacaacagaaacctgatcctgtttagcagactctgcaaacctctttctgccctggtccttccattacaagtacatttccacttcctcagccacttgcgtctgcctctcagaccgactgtgagctggggactggcagcttatgaacaatctcttcagtttgggtgaaaaccttttacccacagtgcggagaaaccaaggactgcactaatgtaaactctgctcacctgcatcaggccctgccagctactaagggctgcagtgaagcagggctgatcaattcaccttattctccaactacgaagtgagagaatgtgaccacacagccaggagtctttcttttctaagacgccatgattttatgattctctactgagaatctgccttaacagatagatctgaaagctgttcttccctgattacaaaagcatgttaagccatgtaatcctgccttgctggtatcagctaagattactcagttatattcacctctgcccatgctgcagacatttcaagaaagaaaacattcatctgaaccagcaaaaaaaggaaaaaaaaaaagtggtagtggcctttcacaagcatcttagtcaccaaaatatttgaagaaattatttatttcagaaagttttagaggaagagaaaaaaaccagatacaaaaaggaagtatttcatagcatggctcccagggggctgcagttttcatgccatgtaagcagaatggcaccactggctatagtttatagtcttctttagactgctggaaatgtttgtcaaagaaaccaatcttattaaagccaccagaaacaaagtaaagacaccaaattgtaattactacaaatattgcgggaatttaagaaaggactaaaaatataacttgatattaggagaaaaccaccatctatgctaaatagtgttaacatctacaatgaattatttccctaaaagagatcacaagagtaccagaagataaaacttacttggctctagcttcttcaggtcctccagtttaaattcttcttgggactgtgtggactaaatttaaaatacgcacattacatcttgttactacaaagattgcgctgtaccctatgtctcctaagtggtaaaaaccaaatattcaaagtgatgcaaaacctatttcttgctttcaaggtggaaagtgaaaagttccaaattgggttttgtttgttttgcattccaggaacattcaggctaaatgtaatagaaaaaaaattaaagttataactttgacttctatagtttatgaactaaatcatgtcagtatgcatgttaatgatgaattcccctaactgtacaagtctcctgagatgacccgactttaggcatgagtgcctactattcagcaggacaatcatgtcagaaagttaagaacacctctacttacctgtaatgctgcacttctcaattctaaacatgtggcgattttgcctatggttttctgtaaggagataaaagaaaatcaggtaaaaaaattttttaatcaataagaggtttctaattctttaaaaacaagataaatcttatttctctgtagcatgtggcagactcaagagaaaaaaagcaggatgcaatggcttgagatgaaggaggtaggtgtgtaatctcctacactaacacctcacaaccaattctaaatcaaggtcacatcggtaacggctctcaccataatttaagggtaatgaatacagtcagtaatggcaaccaatatggaatccccccccccccgcaaaaaattaaaaataaggctggcaagatggatcagcaaggccaggtggtgatggcgcacacctttaatcccagcactcggtggcagaggcaggtggatctctgtgagttcgagaccagcctggtctacaagagctagttctgggacggcctccaaagccaaagagaaaccctgtctcgaaaaaacaaacaaaaaaaaaaaaaaaaaaaaaaaaagatggctcagcaagtgcttgctgctaagcctgacgacctgactttaattcccagaacccgcatgctcaaaggaaagacctacaaattgtctgctgatattggtatgtatgtggtggtctacacgtctgcgcacattcacatacatacatatataaccacacacataaaatgcaaaaaagttattaaaaaattaaaagtagaacactaccatatggcccagcagtcccactcttcagtgtacaaaggacataaaatcagtatgttcaagagatatttcactctctcatttttctgcagtcccattcagttgccacaaatcagaaagacccctaggtatccactggctgacacacgaataaagaaaatgtcctcgtctgtacaacaggacaagaaatgccataatttgggactagggatcaagctgagcaaattaagtcaggaacagaaaggtggggaccacgctctcactcacccagagcattgacaagctgagcctacagagtggagaacagcctggtaagcagaggcgggggagagtcagaggaagggaggacagggagaagcagatgaaggtgggctaagttagtgtaagacaaaaaagcaaggtctgctgttctatcacacaggggacaatgcattacaataatgtatagtacatgtcaaaggcaggggatgtggtgtgattggtagagtgcttgcctgacatgcaacaagtcccaggttcaatccctagcacagcacactgcagggctaaaaccaggcacagggacacaggcctctaactccagcactcagggggtagcatgatcaacaattcaagatcatccttagtagcacagcaaattttaagttgacctaggctataaaagctcctgacttaaaaaaaaatttttttaatgtctttactacaaagataataaatgtttgagcacagtaagtttaatttgatttaaatgtcacacaatagaaaactgtaacaatactttcttattagcatggcgtgctagcccacccatgactttctttaatcccagcacttgggaggcaaaggcaggtgatctctgagagttcatgatcagcctggtgcacatagcaagtttaaggacaggcagggctacatagtgagaacctgtctcaatataaataaatgtattaaaaaagaaataaatagattgcattgtccattaatatgcataattttaatgtttttctgtgttagttaaatttaagtagctgggcatggttgcacatgtctttaatcccagcatttaggcaatcagagacatgtggatctttgtgctttaagggcagcctggtctccacagagttccaggacagccagggctacacagagagacctgtcacaaaaataaatatataaattaattaaagaagaataaattcaaatattccaaaaagaatgccaatgaaaaatggtcaatgccatatagttccaagctttcttatctcttcgctattaagcctaaaattcaccaaaaaattgaaaatttcttaagttattagtacactataataatgaaattctgactcaagcgaacctaacttacttaaatacacaagttatactaaacaaaatcagtacctatactaaatagtgaggaattttacagtcagatatgttttatatagcaagatataaagtggacactaatgactaggcataaagcatgagcttgagagtctacaaactccaacacgggagctacacaaaccttacctcaatacagtgaagatgagctaaggaatcagccccaggaggacttctaaaactaagagtttaggaaagtgacacacagttcacctgcctcaagtcccgaaggcaaagagaaaggtttaaaaaggaaagttctatatttagatacagcttcttacatatattttttctttatctttcttccttcctttccttcctttctttctttttcttttttctttttcttttttctcttttttaaattctaaggcctagagaggtggcccagcagtgaaagagtactggctgctcttgcaaaggacccagattcaaagtccactaatgacttggcagcttataaccatctggaactccaactgaagagctccaacaccctctcccagcttctgtgggcaccaggcatgcacgtggtgcatagacacacatacagacaacacagccaaacacaaaataaaatgccctttaaatttttaaaaagaattccatttgcactgagctatatggacacattaagtatttaagaatgacagtgtcacttctttttcttctttgttacaaaatcaatttcatttcatacacctaacacttaaaagtgtaagttagcaactaggagtttactaataaactcttaaatataaacttttattcttgtagaaccaagaaccctttatacagaaatgcactgcactatagcaaaatatcaataggcattattgatagctctctaaggagcaacacccaacctcactattaaaatgagtggggtgctctcatttcagccacagcaataatttaaaaacacagagatgctcttgatgccaaaaatgatgtgctactactgagatagcacacaaaaatgattagggaactcaagtctactaggtcagagtctgagtacaataacactaagcactggggagccaaatggctcagagacaaaaggggtaaccgtgcttgcaatggaagcctgttaccctgagaggtgaggtggagagaaccagctcctcaatgttctctgacatacacacactctaacaataaatacattttaaaataataatttttaaaaagactaagcatgtagtaatagtgccacatacctttaatcccagaactagggaggcagaggcaggaggatctctgtgagttcaaggccatcctggtctacatagtaagttccaagatagccagggctacatagtgatcaaaaaacccaaaaatgtatgagctgagcaaagacaaaaacagtagacatgccacagtggacagaggaaagggcatgaggccccaaccctacgcaaagcactaaggcaactaagggtgctgagaggagggtggtcttccttagggaagagcacaccaactggtcagccctcaaaacacacatctaagtgacattatagcgagtgagcacattatgtttaggaataccaatgtacatcaatacacacacatgcatgcaataacaatgagaaaagaggctatggatttgaaagagagcgaggaggggtacacgggagggattgaagagaaggaggaaatgttattatatcgtaatcttagaagtaaaagaaatatattttttaaaactcataagcttactttaaaccagaaatcaatgagagtattaagaataagtacatacggaattctcacactatctattactaagtggtatgtttcagaaacattactatttctgttttagaattttttaatgtgtgaaaaggtttcacttttcacttccacgaacctctggctaaactgggttttgtgttcatctgtagggtcagtttcccactatgtctcattacactgcacacattacatgcgctgttgctctcattctcagtgctaacagcaattccctgtgtactcctaccaattcttaaatgtgtacaaaataatgggtttcattattacatttccatccatgctttatgatgtttttagatttaaagttaacattttaaaaaatgcaaattatcttgaaacatgatttataataatcctctgaataaataccaataatctcagagccaacaaaacttttacttataaaatactttcaagagtttactatgagctagaaaaaacttcctgcttcctgaggtggctcacagtataatcccaacatcaggagtgtcacaaattcaaggctagccaaagctacaaagtgaatacaggccatcttgggctacaaagctaagtccctgcctcagaaaatcacacacacacacacacacacacacacacaccaccaacaacaaaaaatcctactccccaaccctccaaaaaacaaccaattaaaaataggaggaggaagaggggggcagaatggaaaataaaagaaccgtagaaatactgatttttaaaaaattctttttctgggtggtagagcaagcctttaatcccaacactaagaaggcagaggcaggtggatctcttgagttcaaggccagtctggtctacagagtgaggtccaggacagctagagctacacagagaaaccctgttttgtgagaaaaaaaaattcaaagtttcacaaactactgaatagcagatatagttggaaactttgccactgttaccaaaacactaaaaacagtaaaaccattaaaaacataaaaattcagtaattcagtaattccccacagtgttttcttatgaacaccagacccaacaggagggagatttccaaacccaaataaaatttaaaagactacacatgcaaactctttaaaatattcaacattacataagcatgctgaagccctgagactttatatttctgttcagaatattgattaatttttcagaaccaatgttccccagtccacatctggacaatcattattttgagccatttattattaataactcaaaacctctgataactacttccctaggtaacaatcaaataagcctattatggatggctgtgcgagtttcacttgaatttttaaagaaaattaaacatttagaggtgtacagcttgacttgcatttataacacggcacatgaagatacggcaggcaggcccaagttctgcctgagcacagaaggcttattggcaagtattctaaataacaactgtttcagaaatccagtggccaggacacttcctaggtaaagctattagagatttagggacacagtatcttttaaggtcctgcagaactctaaccgctcatctcataaggacatttgggcctggaacctgagctctgtggctactccaggccggcctgcctccagtctttccgagtgcaagatcttgagtgtctataagcagctaagtagaaagggctgggctgcaggaagagctacaaactgaagggtgaagagcactatcaaatacccagagggtttagcctcaggtgaaagaaaatggtgaggaagttacaattgcttacctttagcaacatcatgacagattcattttttaatttattattttctttttttaatgatcttaaaacatttttagcaaatcaaatcactttatatttgagctgatgttgggaaacaaaaacataagtaacccaaagtgaagaaattactgagcaaaatatgaggtcactgaactgtttgatgccttaggtttcattttcccttccacgctatatctttattaactattaattcatgcacctagacactaaaactctgttggtcagaacttagacatcctaagttgtttcgatcctataatgccaactggttattccaggcagatgtcacaatctgagagaagagggagaatatcaattttgccctctgcctcaagcagatctctcatttcctctgtggtcttttccagtctaacatctagtcttctgtggacattagcagttatcaaggaaggaaagaaaaataatcttttgaaattgtagcaacatgaaaatttaaaataccaaaaaaaccccccaaacaatacaacaacaaaataccagcggaagggattgtcaaatatgtttaagaagatgtgcatatactaacttgggcaagaacgttgctaatcttggtgatcttttctgtcccaaacacctataactaagagttaatgaacagaagcttatggactaaagtaaattggctgaggcttaacaaattatggcccccaaatcacttgttccccttgtgtaaaaaattaatacgaatgaatgatgtcaccagagtttttaacacagctctgtcttagtagatttggggtacaatgggcactaacattttccttcctattcacaagattaaaagttaatttagtattatagctactctgagtcaggaaaaatctggagttatttcctccctttccccaaccttcaggaatgagtgtcccatttttttttttttttcccaaacatctctactggggaatcaacttgacatactaacaaaatctaattcaaggagaaagaacaccattgaaactttttgcaacattgtctgtttactgatagatttgcaggccaattttttttttttttctcctaaaacaaggttcctctatgtacctctagccatcctagaactggctctgtagagcaggctgacctcaaagtcataggtccacctgcctctgcctcccgagtgctggggtttatggtgtgtaccatcactgcactattttcttttcagtcttaccctttttgctgttacttgcttttggtttagtttgaaggtttgagggtgattactggcttactttgagagaaagaattaagtgtgaggtgggatgcaattattcgtagccttctttccccaggtgactggagtacagtctgggtttccccaccttactcaaagtgaaaatggctgaataaattcatggcaggtcatctccaaatcatcagatactgtcagaaaaaaacataatccataatctgttaacttacacataacagaaagggggagcatgtgtgtgcgtgcgtgcgtgtgtgtgtgtgtgtgtgtgtgtgtgtgtattctgcttaatggacccaaaagatagaactctttccttttcatttggaaccagatgcaccagagactgtgttatggtaccttttgctcttctgtgaattcagaatcattgtgttgagcttgggcctccttctgtaggtgtcttgctaatctgtaagaagaaaacactgtttagaactgaaagcaagcaagctatctcaacagcagcaagatgatacaggccaatcacttaaaaaacagtgaagcacaatgctttgttgtaatgtcaagtttctttcacccagagaagcaaactctaaatatgctacaatacttttcacaccctttcactgggtagaatctgagccaagagagtaaaagcagagtgcaaaggcaggagagggtctccatgggcgtggagtccagtcctccttggcatgaacagactcttctgtaaccagccagaggtgactatccagatgcagctttgactctacactgagcaccaactgctgcactgcctacaggcgctttatcaattattaatttgatgattagtccaaactcaaattacatccatgacaaagtgtgagtaccaaaatctggttttgaaggtacttgttttggggggaaattacatcattcataaacagaaatcattgattatccaattatcctatttttaaaaatggcagccatgaagccgggcggtggtggtgcactcctttaatcccagcactcgggagacagaagcaggctgatctctgtgagttcgagaccaacctggtctacaacagcctccaaagccacagagaaaccctgtctcaactcccccccaaaaatggcagccatgggctacggaaaagactctgtctgcctccaaccctgatgacccaaatttatcccagggcccatgtggtacaaagagggaaccaactttccaagttgtcctgtgacctccatatgtacacggtatacacatgcatgcaaacagcaggccatctgagagttttcaaggttggatcaatgtttctactccaagagcagcaataaggatcaaatctatttgttaaagagtaaaacaaaaagggccaacacttaaaacacacacaatacacacacacacacacacacacacacacacacacacacacacacagagggagggaattcttgagagattcttgaatccagctagtaagaacacaaaaagacacatatcataagtcataagaaaatgcataccaaatgacaatctacccttcacagctagagatgccagtatttaaaaaaaataaaacaaagggagaaaataacaagtgtttaagaggacaaacaaaaagcaggaacctcatacactgctgacaaaaaatagacaatggtaccaatcatatggaaaagtttggtagtcaagtaattaactacatacttactataatacccagaaattttatagtaggtatacatcaaaaaaaatctcaaaatatgtttacatgaaatatttgtacacatacattcattattcacaacaactgaaaagcaggaacaactaaaatgctcattgactaatgagtgaataaataaaatgtggtatatccattcattgaaatatttttccttagggctggaaaaatagctcagcagttaagagtacaggctgctcttacagaggaaccaggttcaattcccagcacatggcaattcacaaccatctgtaactccagtcccaggggggccaaaaccctcttcagacctctgtggacaccaggcacatatgtgttacacacacatacagagagacaaaacacctacacacataaatattattcagtcataaagaggactgaaattaaggtaacatgctataacatgaacttaaaaatattatgctaaatgaaagaaacgacattaaaagactacgattccattcacatgtaaagtccagaataaacccattgagaaaaaaattattggtagttgctgttagtatcaggcatctgtactggcctgcccttgggggttctgataggatacaccctcaactgcagccattaagaacaccacctgtgcacattcactacgttccctttcaaaagggccctgcccatctcccatccttctctccctctctctgtcccgctctctctcctccttctctccccctttcatctctcctgttgctcctgtctccggaggaggctggtcccccctcccctttcccttttttatgatccctttcccttattaaaaacaacaacaaaaaccaaaaatctctgcttgaaccctgtctcatggcatctttctctcccacactgcttttttttttttttattacaacagttgcttctaccatttacttattttctcctaaagctgggaacatattttctccctaagtaatattctcagactttcatggactctatacaagacaaggtatagagaaaaccaatatggtcgttttccttgttcaggactcatgctgacctgcatagagtatttcctggaaatgcagtttatagcgttataaatcaactatattacccttgaacttagggcaccacaatgtgacacagttgctccatctgaataaatctacacataatttgctaattgtggttattaggtcaagcagggtgatcatcagaagaaaaatgacagctttaaattcttgttcagatactaataagcaatggaaagaacactaaattcaaatagaacccaatgtacaaaatgtagacaacagactgggaagatgtattacaaaaataaaggatttacatccagtatgtatgtatgtatgtatatagaacctttagaattttatacgtgcaagataattcaatctttagaaagaggcaaaagatttagaaggcacacaaagatttatagaggggaaaatagtcatgaaaaggcagtaaacaccattagtcattagtgaaatgtaaattaaaaccatggccaggtatatcacataccctctagaaggatgtaattagatggacagtaccaaatgctagctatgtgtgtatgtgtgagggagaacctcccattgctggcagaaatataaaatgatatccttattctggacagtaactcaacagatttccttgaaaagccaaatatttaacataagatccagcagttaaactcactggtatctatctactcaaaaggaatgaaaatgcatgtttacttgggctggagagatggctcagtggtacactgctcttgcagaggacctgagttccgttctcaacacccatagcaggcagctcacaactgcctgtaactccaactccgagaaacccaaacttctggtctcccaacttcagacacctgcatgtgtgcatatactgccctccacataattaaaaataaaatttaactttgaaaacattgcatgcaaatctttagggcagcactgcaggtagtaatcaaaactcgaatgctcaattataactagtttagtgggcacatgaagtgtggtgcacctacacaatgtaatgttattgtttactaaccaaaacaataaggcatgctgaatgaatcttagattatgctaaataagtcaccaagaatgtggtgtgaatacaaatgagcaaaagggacctttggagggaactggaatgtcctaaattcagtgtggtgacggttgcgcaaactggtgcatgtaaaatgtgtcagctggtggtgtataagttatatcgcaatcgattttgttgttggaggtgatggagttttatgttttgagtcaggtctcactatgtagccctccctgcctagcctggaactggctgtgtagataatgctagcctctaacttgcctgcctctgtctcccaaatgctgggacttaaaacaaagaaagaacaaaaactcctttttcttaatgtcttatatatttctgaaatctataacccaaatttcatgtgaatggactcctacaactgagccctgattgtgcacactgaaggaaaagccatacactgtggataatcagatgaagaaatgaaagagttggctatgggtaatggtgagaaaatagtccaatactcttctctaggcgctggagcgatgcttccacagttcagagcacttgttgcacaatccacataactagccagacatccctagcacacctgtaaacccagcaccaagggtgcagagacaggaggatcaccaaggtcggatagaatatccagggagcaaactcagaagggaagtgttttaaaatggtttgttaacttaggccttttcataccaatgaaacacatctgctcctggcagcaccagtcccttcaaagaggcctgacaggtaatggagtttgccttcaatgtgacaaaactagccgtatgggcaagaaactgctctcgcctgaactacctgactatatgctgaataaactcagagaaggacatcaagataaagtggccgatagagaatgtttattgtacacacaagtacacacaactcacataaaggcaaatcttttttttttttttaaagatttattgattatgtatacagtcttctgtctgcatgtatccctgcaggccagaagagggcatcagctctcattacaaatggttgtgatccatcatgtggttgctggggactgaactcaggacctttagatgagcagtcagtgctcttaacctctgagccatctctctagcccctggcaaataaatttttaaaagttctctagagactcctcttctactacaaaggtgcctacaaataaaacaagactgctctcaggaagtgtccttcatatacttcaagcacattattgctatagacaggaattaccatctgtagcaaagaaccaggttttctctctactagttcctggctgatactctgcagatataagaaaaaaatactataaatgcaggcaggtgagatggctcagcaggtaaagctgccaagtctgacaacccgagtcaatccctgggacagacatgaaaggcgggaacgcaatcctgctagttttcattgatcttcacatagaggcaccaggcacacatatggtgtgcaaaaatacatccaggcaaaacactgatacacataaaataagcttaaaaataagacataatattcgtaccgtgaaagcacatacactatgccaccaacatggccacacaagctagcctctacatgctgtatgattatggagacagtgtggctgcccagttaaaaagcccaattacccagaactctcccctcattcttgatacccagccagtgactaagtaattgtgtgcatcattttcatggtccccaactggcctccttggcttcagtctttcctcccaaagagtgtattcaaaaacaaagagagagagggcaacttgtttctatttcagtagattagaaagatgtaaattcttggcctcagaaagatgtaagttcttggcctcctttatatgtagcctgagcgttacaaagttcagcccaatcactacatttctattgaaatctgacagtgcagttttgtaagaactggaagagtattctgcagctctccagtacagtggtcagtgtggagactcaacaaagggtttgcatgagcctgttactctcattcccactaagcagctgcatattcaattttcctttgtaatgtcaattagacatggcattcttcactttccactgggaggtttgctgcccagtaccaacagctgctgggtccactgtaccacaagtgaggggcagctttgcatttcagggtgtgccactttgattaccatagagggtgataacacacagaccctcatggtgttacctgatcaagttacagaagagcacattctgcaaaatgggaggaatcttgaaatttatccagtttatttttcagagttacgctatcaatgtttgaccaagtacagcactttgttattaactcagatatcaacagaaagggactgaagatagaaaaaaaaagatttcaaatgtattatgttatgacactagctttctaattttatgaaaagaaaaagaattctatccctagtgggcagtcacaaaaacaaatataatcacatgggggtcccacatacatgttagtagttgcccagcatggcaaaacacccaaagcactgcgtttttcaatctatagaccattctgtcagttacgacaggcagaaaacatctatatatccaaattatctcatggactatccaaaaacaagtagctattgtagggagaggataagagtgtcaattttccaagtaccaattctgtactcttcccagagagatggggatggtttcacaatttgagaaacttcaaacaatttatttcaaaagcaagaattaatggtaacagtgtgcaaacaatagtatttaataggcagtttcttttagtactaggtccaagaaagtaagcaagatgtttatacacagttctttttttttttttttaaatgtatctaaagtttaactgggaggcaccagaaagagataataatgagacttgggtggatgaaggaagccagtcctgacatgtaccctcaggctatacgttgtacacaggaaaagggggagggacccacggagggagtggcggctcctgtgcctggtctattaattcacattttgctcccctttattcatatcctgcacggactccacccaaagcagccaagcgagagggtgggtgggactcacagcctagcaaataacagtcccagaaatcgaaaacgaaatcgagttggaattgtgaaaacacctctcaccagacagaggggtggggaaggagcgccagtagcaagtagggacccttctcggggcaggagaggcatctgcaagccttcccgggggcaacctccactcccgcgttagcgatccctcctgttctacacgtggagagtggaagacacacacaccacacacacactcacacacgcacgcagaacacggccactcatccccggaacgtgggcgaagagcacacaagtattcccaagggatttccaaagacatctccccccccccccggaggggtggcaagcggggcgaggcggcgggaaggcacggggactgcctgcagagcccagggcccgtgagaagctcgaaggggactcaggagagagccagttagggccccagcagctacctgttgaatggacccggccctgtgcagaggagggaagatgcgggagcttccccggagggcgggcgggccagggctcccgggatctcagccccggggctggtgcgggccccaccccgggaaagcttgcgctgcggggcccgggcggcgccgcgaggcccgggcagaagacccgccgggcccgtccgttcccgcggggggtcactcacatctgatactcgtctatcgcctccaccagctggccccaagagtcgaagtcggcgcctctcctgagactggcgccccagcgctgcagcagactccgggtcacctccgacatggccggcccccgccccggcccctcccggccctgcgccagcgaggccgggctctagggcgccatcctccccgggccgggccctgacattaacagggccagcaggaaccgccgaggccacggccgccacccgccgaggagccgcccaaacccatttgccgccacagccaaactttgcagctccgccgcggccgccccgccgaggccacgccccggccacgcccccggccacgccccagctaggttgaggccgccccggtccgccgaggccatcgctcggggtcgcgcccgcggcggagacagccctccctctcggggcccagaccggagctgcagaggtgcgagcgaaccgagttcagcgagggccggccggcggggcaggcccaggggaacccgcccctccgggacgcgcgcggccgccgccgcctccgaggcccgcacggccccccggtcacgtgacgcccgcttccggccgctctagcccagccgtctcggtgctccgggcgccttccttgtctcgctggcggactccgtcccgccttcccgtcctcccgcaggagccgcggcgtgcggactctcgagtccccggcaagcgtgacaggaggtgtgtgcgcccgtgatctccctccacagcggctcccgtgaccctgggatgcgagtcaggggaaggatcgatggccttgacggctagatcggccggcgtcccctctggctgccagagggcttgctagacgcgggacggcggctcggcgatcatcggcttggccttccggggtggacgggatcggtgtgcggcccgacggcctgcccgcggcccgggaggagggtgcgggggtcgcggcgctgactcagtggtacgcccgctcgcccggaggaagaggcccgcggtaaacaggaagtgggcgcgggccttgtctggacagcggcccggctccggggagctcccgagtggggagggggtgtgtccgcagcaggcgcggccgtcccgggagagctggcaggtgacgtgggggtctgcgggctctggatgggcgggcgggtgggtggctgggtgtgtcgttcctcgaccccaccctccccgagttcttgagatctgaggagtgccgggtcaccggagcgtttgcgggatgcagcggagtcactaaaggaaacagtagcggagattttgttttcacaaatgtccttgcagcatggaagactcacccggtgctgctgcctccgcataggctttgaaggaggtttgcgtccgcgccgtttaggtgatatgttctgaaagggcttgttaaatgttttgagtcctaagtggacctgcccagcctctcactgagtatataacgcattctctgttcgttaaatacctgctttaccggctttgcaatgagtctagcctgaatgatgcataatgttgatatttcagaacgctgtaccccttcacacccccctcccccttaataaaggttgattgaaaaccttacattatatttgccttatcagaattgtttctgcatttcttctggaatctaatgagaggtttgaggcttcggcttggagccttcttatgttactaaatgcgtttacctacccaggaacttgaaggggctcatctggtcctgtaccttctcgcttgcagctatccaaccaaagtttcagctttgcttctcagaagtgtagactggagctctgcgtctcaggctttcccccagaccagtgagaacacatcttagcaagactgacttacctccaggtgatttttgtttaatgtgttttaaagttaaatattactgctcttccgtatctatttttctttttatttaaattctttaattactattcaatttacatatccatcccccattccctcaccctcccagctcctctgtgtttatcactgaagttattatgaacaaagttcttgattttcttatatagatgtaatctgtggtatattatatatgtgtgtgtgttttgtatataatagattgttcttaaaatgtatatatcgtgtaaaatagccagttcttactgtgccttttccctacttaatattccttcaattttctgtcccttctgcctgtagaacacatcttgagaaaatgacccattggtttcataggaacccattaaaagctacagctcctgtgtcttttaactactatggcatgatcactggtcctgctgcttcaaagatttgcaagtaagtgttagcgaaacttaagcagtgtgggttgggtagtgattcaaggtactttataagttccgtggtcaatacgaaatgtgtgacacattcctaacattatactcatgataaattctattttatcaccaacagatgaagattaaatcatggggtacttaagctttgggagtcattgaggccacatccttagttgcagatcagtaaatgagtcctagaagggctaaggcagtaacagagttaaactatatttcaacagaactataagataggatataaatattattaatgcgctggacagtaaattatgttccaagcagagagagagagtcctttgatttcaaatggccttcaaagtagtgatataggagaaagcacttgagctgaggttcacataaattgtttaactgatatcaggagttggcaaactatgcccactatgttagacccactccttcttttgtttctgagtgagtgtgtgtgtgtgtgtgtgtgtgtgtgtgtgtgtgtgtgtgtgtgtgtgttctcccaaagctcaacatgcccaaagttaaattcatcttaaaatggtacaaactgagaaaagcatgccttagaaatatgtaatttagattcaggcagatctgagctcagattcctaacatctacatgagacatgggcaagatggaatggtacaccccggaccccagcacagggtggatggtgcgcccctggaccccagcacagggtggatagtacaccccagaccccagcacagggtgcagggtgtttgtggggacaggcaaatcctagagcactctggccagcagggttagccaaaatcacaagtgctgggttcagtgagagacccagacatctgtaactaggagagaaggaggattctgggaaatgtagtagggagtctccatgagatcccgggaggagaggacatgactctggcgttctcggtaagataagaccttgtggaaatatatatattagctatgggttaatacagacagagctagctaataagaagccctagatactggccgacagcattgtaactaacagtctctgtgtgttatttgggggctctgaagcggcgatgggaccgcttatgttaatgtccatttaatgtgatttctggaattctcatggcctcctggattagatgtaggtgcagattacagatgctgtagatttcagaaaggaagtcattgaagacatgagaatagagacctcaaaagagaccaccagaaggtcagagaccagcattattataggtggagagaaatggagacatagaaaggagctgttgactggggaggtacatctcgaaattgtagtggtcactgtgactggggttaacaggaattcctaggaagaggtggatacaagacccttcttgttgcagagaagaatagcatgtagagggcagctgtattgtaacctaatggcctcacagttttacattttctgcatggatatacattcatacactacgttagatagatgttatgtgtgtagtgccaaatttagaaagtcaaaacagttattaaaattatatacaagtacattaaatttctgttttccccaaaaccattggctaaagaatgaagaatgggacaggctttgacaaactctagctagctctcgggaggcagaggcaggtggatttttgggagttcaacaccagcctggtctacacaggacagcctggtctagttccaggacagccaaggctacacaaatcctatcagaagaaaacaaaatacatttaaaaaaaaaatgaagaatgaattttaaatacactcgattgttgtttatgttaatggagacatggtctcagctgacctgaggtgattcagccttgccttggctctgtagctaagggtccttcttccacctcccaaaactgcagttacaggtttgcactgccgtgcctggatgacagttttgttttcaaaactcactttatatttttattgttcaaatgggtgcatgcattgcccctttaactagactgagtttattttcttacaacttttgaagcaattattactagaaacttcatttatttctaacattggccttaattaaatttattctttctaattgatacaaaggtaaagaagggagcaggggatctgtgtgtgttttaatgctttaagttgtagcctctgaactgtttttacatagtctttgaagcacagcttaattagctttactgtctgttgatgtaagtgatttgagatcatccaggactcgactcctcgaattgttcactgatttgagctgtaatccggaaacgatgaagaatgcagcagacttgtatttctcacttttacaaggttagtcatttttataaacttaagcatttctaaaacctagctatatagtagcatacatttaacttttcagatacaaagttttatctcccaggctatatttgggatgattgggtctcagactgtaacactgtggtggtggtacatagtctttctaatataatagactaaaaattgatatatatatttcatgttctattattagatatgtaaaatgtaggaaggaaaaaaataccagaaagttcatttaggcacctgaaaaagtaattgtgtgtatgaatgatagtgatcaaccagcagtcaatagggcaaggttttctttattcagatacaccagccaagggcaggccaaagcgaggaggagggagctgggaccagggccagcagaagaagggggagcagaagagagcacccacgtgtcctcggaccccttaaccttcttacggcaccttagacttcccctcaccccaccctcacgggcatgttccagcacacctgtctgggttacctggggtagagctagagtgtctccctgcatatgaataaaacctcaattgtttttggtggggcagggagttcaagacaacatttccctgtatagccctggctgtcctggaacttgcttttcagaccacgctgaccttgaactcacagagatcctcctgtctgtcttcctggtgctaggattaaaggtgccaccaggcccagaaattaaaatgcgttgcatctttttataggtttcataaattcactgggcgattctacccaagaaagcaaattacggtatgttcagagtttcaagtggactgacacattgcaaggccatgttccaaggtgagtgagtgctgatgaggccctaagtccaagtttgcttttaactgtttgcctaatgtagttgaagaagaaaaacagtacgcattttcacttgttaggaaactaattaaaacattgatttaagctagtgtgtgctgttaactttaaaataatgtgtttctaccagacaaatccgtttttgtggcaatataaatgttaagtttaaacaccttgaaccgtctaataacatccaatttgcggtccaaaatgggcttaatttttttctcctcatttctagtcatgtttcgactctaaaagtcccttcacaactttctcagtactcaactattaataatagatcactgtggcattagcttttattttttaataatacaagtagattgttacagtggtcatagatgtttgtttaataacagatagaaaaggagccagcaaaatggctcagtgtttaaagatacttgctgccaagcctgacaacctttgtttaattcccgtaacttgccttttgacttacacacgcctcatggaacatgtgtatccacacacacaagtaagtaaatagataaataactataaaaaggtacagtaaaaatagacaggaagagattggagaccacaaatcccagagtggtgctacaataggaagaatggatgttgggtctatacatgccaagatgcaatacaggttttctgtgaattgagcatctactttaactgaatgctgatgacgtaatgataataggatactgagaggaacaaaggagaaactgtaggcatgatgaatgatggaatgccaggcctctatacaattaagacattcactatgtgactcttcttccttccttccttggacatattatttggattagtagtcctgaataccaaagttttccaagactttttctgttttcctttgtgtaatcactgtttttcatccagaattaaagatttgttgttgtgaagtttttgtttgtttgtttgtttgttaatttttttggtttttgttttgttttgtttttcagacagtgtttctctgtggccttggcggttgtccttgaactagctcttgtagactaggctggtctcaaactcatagagatccacctgcctctgcctcctgagtgctggggctaaaggcgtgtgccatcactgcctggctgtgaagagtttttaaaatttattcatttgtattttatgtacattggtgttttttgcctgcatgtatgtctgtgtcagggtgtcggattaaagaacaacatacaggaatcggttctcttcaaccatttggggccaagggattaaactcagaccgtcaaacttaactgcaagagcctttatctgctaagccaagtaagctttgtatagcaatgtcttcataatttacagaacttaatgatttcatttttaattccagtgcccagcaggatgctgtttttgaattgatctccatgggatttaacgtagcattatggtataccaaatatgcttcaagattggctggaaaagaaaagtaagttagaaatcaaaggttgtgtgcgttcatatgagtgtgagtgtgtgtgtgtgtgtgtgtgtgtgtgtgtgtgtgtgtgtgtgtgtgtttaaatatattgaatttaagtctaggctatttcctaaaaggttccacttgaagtaagtgcaagagtcattgtttcatacttaagtactgcagttatgcagtttaacctttgttttgcacatttttatttattgctcttggggtgggagaggggcacacagagcagggtgtatgaggaggtcagaggtcagctttttgggataggttctctccttccacctttacatgggttccagagtatgccaggttgccatcttgtacagtaagccatctcacaacctctgtgttctggttttaaaagggaaaaggttttcataatcttgttccatggtggtagatctaagtaaggctccagaccaagaagtcattaaaaatgtgaatatttggctacatgtaaagtactgtaagcagaggtttcaaacagtgacaaaattgatcaacaatttttaaatgtagaatctaaaaatcaacagatgccatcaagtcagttgaaaatagaggatatgaataggtaattcatagaaaaagagatacaaaaggcttataagtatgtaaaatgtttagaagactaaagaattgcctaaggccagtgaggtaactcagcgggtaaaggtgcttaccatccagtgatgcaagcccaagttgaaccccagagcccacaaaacaatgggaggagagaatggagcccacagacttgtcctgcggcctctgctcatgcacctatgcacacagagaacataacaatttataaagaattataaaattaaatgagacaacttttgtagtaactaacatggacagtgttaggaaactggtacgtcagttatagttcatccatacataatcatatgcagccacctaagcatgaatcgtgtttgctgatataaaatggttcagatgagcagagtagtgtgtggagctaccatgatgtattaagttcatagtttttttgtttggttggtttttgttttgtttgttttgtttttcgagacagggtttctctgtgtagctttggagcctatcctggcactcgctctggagaccaggctggcctggaactcacagagatccgcctgcctctgcctcctgagtgctgggattaaaggactgtgccaccaatgcccagctaaattcataatattttgtatttgttaatgatagaacagtctggaaagaaataagactgtttagcattaacttctaggcaaggtctctattcatctgtagtgtcttgggatatgtttcgtgtgcatttttaatttttttagtgtcaaattagatttttttctttttaaggaagaaaactcttgtggaatattagttgaaggtgtgttagatttgtttatgctgtggaacatttgtttaatgatgcaaagatgtgttgcattctttcatgttgcattattttaactttatgaagctatgttactttgtctaaaacacccaattggtgtaataaagaggtggatggccaatggttagggaggagaaagcatggacggggctggcaggccgagagagtaaataggtggagaaacctgggaagaaaagattgaggagcgagaaaaggaggagaggaaggctccagaggcagccagctacacaacaagccatgaaataagaagtaaagacaggtatatagaaaggaaaaagcacagaggcaaaaggtagataggataatttaagaaaagctggctaaaaacaagctaagggcaggcattcataagtaagactaagacccctatgattatttgggagctggagctgggtggcaggcccccaaagaataaagaataaacagtgttaaaagtaaatatatacatatttatatttatacatatatatatgtgtatatatgtatatatatgtatatatataaaatctccagcaacaactaataataagaaacacaaataactagtttggttttctgatgttttaaaatcatgtatctgtgtgtgggtatgcgtacatgcatgtggaggccagagtcaccagtcccaaacagttgtgagccgcctgacatgggtgctggcagctgaactgggtcctctgctaagagcaagtgctcttagccactgagccatctccccagccttggtgttctgataatgtgttagctgttaggaccagaaatgcggctcatcttctgactagcataaccactgtcttaaagcataacggaagatgaagcaaaagaagtccatcgaagcctaaaaattgcagctgggatttttaaacatttaaaggtaaagtgtgtggggggggggggacagggtagggggggccagggagtgtcgcattaattcttggaccctatgtaggagttagtaactctgttgtgtcaaagaggtaatacggtccctccagtgcctgtagggagttggttcaagaacagacggcccctttcacacctccgtaccaaagtctagattcccaagtgccttttcaaaagtgtgcacatcctgtgtactgtaaatcatctcgattggctactagcacagtgagagtgctctgtgagtgctcgtcctgctggattgtctagggaatggtgacaagggaaatgtgcacactcggcacagatgctgccctggtggctgagataaatgaatgtctgtgctgttgtgcattgccctctgctgttgccaggagcagtcgaacttcctcaggttgcattctgggtctcactggccagccaatcactgcaatctaattatatcagataggctgaagataggatgggaactctgaggaaaaaccatgtgtcttcctctgaaacttcccttctactgattaaagctactgattactcttggaggcagctttaatgtgtttctttagcctgaattagatgtagaatttgtagcattttcttttcatcactacttcttactgtgaataggcaattcacagtacaaaagagaattgcagctaattactctctaagataaaaatgttttgcattatattgcatatgtaagaatctctccataacctaaatgttgctgttgggtttcttataaaagtttatttcgagtactcacctcgcctgtgagctttcagccatcagccgctgcttagtctgtcctcttagctcccagtgagtctcataagtcgaatcttcacctctgacagcagtgctaaggtgagatttgacacgtttgttttctgtcctttctctaggaaagtcatatacccaaacttcttacaccagcagaaaagggccaggacttagaggctcggctcatagacgcttacgtcatccagtgccaggctgaggcgcaagaaggtatctaaatacttgaaggtgttttgtttttaagatgtttatgttggctttggattcttttagaaaattagccatactaagtttcagattgtaagaggtgattatgaggttcattttatccttaacgtttcctttgctgtccagggagctcctgccagctaatgttccattaaggaggattttgatttcacatctttttgacagaattaatgttaatctctggattttctttttttaaattaaattttgggtgtgtgtgttagtgtatgtggtgggattatgtgtgtggatgatgcctttggaggtcaggaagggtgccgaatcccctgaagctggagttacaggtggttgtgaccctcccaaaatgcatgttgggcactgaacttggttgatcttaactgtgagcaccgctgcagccacaaacattaaccctttactcatctttcctcctgtgttgtgcttattattttccttctactgattaacttaccttgaagtcttcatgtatcccttgcaggaatcagtaaagtaacccctataagcttttttatctgtatgtcagaatggagtgctttcagggtacttgttcatgtcatgctattttatagtaattctctgtgcttggctaataggtggctagtgatttaaagatactgtgtcagaaacacaaagtcagtgttttcttttgtgttcctattttctataaatttttacactaaattgtatttaaaaggtactatcaggctatcttaagctattctggctgaacttgctatagatgaagatgaacttagagagtgtgtttcttgtgtgtgggttacagtaacaattgcccgcgcaattgagctgcagcacgccccgggactcatcgctgctcttgcctatgaaacagccagcttctaccagagagcaggtaagccatcgtgttgtcgcttccagactgcctagattctcaagttcatttgatttttctgaaaagggaagaaagaaagcgggattctcctttctccattaccacaccagaataaaatctttggggttttgccttgtttaaaataagaggccaggtgtggtggcccaggtactccagagactgtcacgagaggattgtattaaggcctgtctaggctacagagtgagatcaaggcagtttgtctcaaaaacagggagacagctctgtgggtaaagtgtttgccatatgagcctaagtttgatctgtaggctgtaagaaagtcaagcgtgatgacgtgtccctgtgatagtgctgaggaggagtcaacggggttcctgcagcttgctgaccagtcacactcagaagtaagagaccttgtctcagcaggtagggtgaatagcacacacacacacacaccacacacacaccatacacggtcctctcacacaaatacgctcatatacatgataattaataggctataaattaatgtatgatgaacttgtagtgagacatggtgtaagacgcatccagtgtgggtgggctagagaacgcttgcaagaggaagtggcttcttagtctcgttcaaaacaaactgagtctgatttgattggattgtaattttgaaagaaaatacccatctcacatatgggtttgctgtgtgaaggctcggtgtttaggaagaaattgttacaggctccggagcaaatgaagaaaggtttgacagtgataacgaagctgaaaataaggaagacaaaaatcgattgaggaagtgtttggattatgtgagcatgtgtggacatgtgagtgtgtgtgtgtgtgtgtgtgtgtgtgtgtgtgtgtgtgtgcgcgtatggacgtgtgagtgagtgtgtgtggtgtgtgtgtgtgtgtgcgcgcgcgcgtatggacgtgtgagtgagtgtgtgtgtgtgtgtgtgtgtgtgtgtgtgtgcgcgcgcgcgcgtatggacgtgtgtgtgtgtggtgtgtgtgtgtgtgtgtgtgtgtgtgtgtgtgtgtgtgtggtgtgtgcgcgcgcgcgtatggacgtgtgagtgagtgtgtgtgtggacattgtatgtgtgtgtggacaagtgagtgtgtgttgtgtgtgtgtgtgcgcgcgtatggacgtgtgagtgagtgtgtgtgtggacattgtatgtgtgtgtggacatgtgagtgtgtgtgtgtgtgtgtgtgtgtgtgtgtgtgtgtgtggatatgtgagtgagttgtgtgtgagtgagtgagtgtgtgtgtggacattgtatgtgtgtgtggacatgtgagtgtgtgtgtgtgtgtgtgtgtgtgtgtgtggatatgtgagtgagttgtgtgtgagtgagtgagtgtgtgttttttatgaacggctcagtaatgattgactggataataataggagttgtttctggtagcacatagacctgtctatataggtatattacatataattttaaagctatgattcaaatacttgctttgaaatccgtagtcctgtctctttttgtcatcaacttaaagctacattaaccatcaaattgaagaggtacttatgttgttcaaatatgtaactataagaaataaatcatgttaagtatataaggttctttttcctcttaatgtatgaaagctcaaatttaggctagatggcattctgcttttagtaccagaacacaggaactaagaaatgttccagtgaaactgggtgaaatgatattttgctttttaaaatgtaactttagatcatactttatccagtttggagcctgcgtactctgctaaatggaggaagtaccttcacttgaagatgtgcttttacacggcctatgtaagtcccagtaaccctacaggtgcaaattctctctcccgcccttgattgccagctctctcatcttgccactaatcattggcaacaagccagggacaggcagcagtcaggaaatgtcccctgactgagcatgtagagaagtgtagacctggagttgctgtgtgatcccaaattgtactctcattctctccgttgttttagcctgtccattgagacggtatcaacaatttctaatctcagtggtttgggaagatggctcagtaggttgtgagcaagtgtgatgcaagggtaaagtcctagtgcagatccccagaggccatgttaagctggatgcagcagtgcgcatccttaatgccagcaccccacagtgagagagaaggcagaaatgcctgcagccagccttgcatacctctcagcaaacaacaggactgagtggaggcgggcggggacagtgtggaggcaggtggggactaagttggcctctgaccctctgcctcactcactcctccagcacacagtgatttcgttgtccgttgttttattttaatcttaaagtgcaccctgcagtgcagtgacctaggtgaaaaaccagtgcgcaccattttacaaggctattatcagctgattaaacaaccaaccttgattctcctcatgtgagaggcagtgaaaacctttttcagagtgaagtaaatatttctatccttacatgtcacaatgttttccagcacattcctgctcagcaccaagtgtctgtatcaacagaattttttttaagattttatttatttattatgtatacaacattctgcttccatgtacatctgcgcataagaagagggcaccagatctcataacggatggttgtgtgagccaccatgtggctgctgggaattgaactcaggacctctggaagagcagccggtgctcttaacctctgagccatctctccagccccctgtatcaacagattttaatgagtggacttgaggctgacaaagttttcttaaccctgtggcccttcctgggtgtggtgaaacgtgcctgtaaccctaaccctaacatttgaagctgaggctgtaaagaagaccttgctggggaggtgggggtgggggaggggaggatggaaacggacacaggagacaaactcgacttgttcatatcaaagcatacatacgtacatatgcataacaaagaatttaatcctttattttcctctgccctcatttttaaaacaagtttcagctagcaggttttactcttggaacatggttacaagcctactttgcctcaggactggacctaattgtgcctttcatttgaacagaaatagggggaagcttacccctatctctggattgcatgggtagtccaaacagtaactgacaatgtttatctggcgtgtaagtgccaggacagaatatatgaaaatgtgttttttttgctaggcatattgttaccatggccagactctgttggctagtgataagtgtggagaagcgatcaggtctctccaagaagcagaaaaatgtaagttttgctttcgggactttaaacctcctttagaaaaaaaaaaaaaaaaagaactttcatcctaaaggaatgagtagattctggcagagttaatgaaaggaaataggaaaggtaataagcaagatagttggagaaaagaaaacaaaattcttatccttgagcccatagaaaatgtcgcctcccagcagtgctgccatgtgtttcttttacagcaggtgaaaacagcagagggcactgtctctgacttaaagctttcgagcacccacaggcaggctgtagccattctcagactgttgtcctctctgcagtgtacacagaggcagaagccctgtgcaaagagtatggggaaaccaaaggaccaggaccgacagccaagccgtcaggacacttgttctttcggaagcttggaagccttgtgaagaacaccctggacaaatgtcagagagagaatgggtttatgtgagtgctgctcactccttgattctgataccacatgtctcgtaattgttaagatagtcacattttagtgacagcctttattgccagtctaaaaggagttgtcttaagtcgtatttgaatttagtattaattttctctttaaattactgataaagttgttaaggccttttattctgcatatgatgatgtcataaaaataggtttaaaatctaaatgtgaattgttaacatagtttatttcactcctataaagacttctttttctattaactttgtttccatatgctacttagatgtgtggggtatagtgtgtgcatgatgtatggggtgtatgtgtgtgtatggtgtgtttgtgtgtgtgtttataatcagcttctttgcaaatttgtctcacactggtctgagctaactataaagtaggaaattttaatttttgcataattctgcctggtctttttgggcagtaagactaagactgttagtgtgcagactgtagtttagtgcttttgtaggctgggagaatcattcttgtccctgcctgcctcttcatattcttcctgtgatactctgctttggtcacactggacttttcacttgcctgcttcagtttttgtcacttcccttgaaaatagactgagtccccaaatccaggcccactgcccctctgtattctttctgtccttggaagctgctatttattgtgctgctaactgctagggcttcctgactttgtcatctgtcctcctgggactgtgctcccagggcagagaactgtcatactatctagtcttgaacatattacgtgctcacatagttgctgaataaatgaataaacccaccattttaattgctttttgcagttactttcaaaaaatcccaacagaagccccacaactggaactcaaagcaaattatgggctggtagagcctgtgccttttgaatttcctcctatgagtgctcactggacaccggaagcgttggctgcatttgatctcaccaagagacccaaggatgacagtgtatgagaacggggcttttccttcctgtcacagacctttaagaagaatgtagagctagttttgcgatgtctgtctacttcagcaggactgtgtatttgtctgcatgctcagttaggttattgcagtgcttcatctagtcagttgtagaccgctctcagaagtagcccctgtaccttcaggaacttctggctttctgtgtaatttactgactgacattgttttcgttttcgaagtattatttcgtttacacagcttgtcagtgctttctttaaggagagtgtgggggaaggtcatctgtattgatgttgctatagcaattcccctctgacactaggtatttgaagattcaatttaacttcagcactccgttagtcatccagaagtaaaacaggatgcttttgcatttgtttatacttaagtacttcatggtgctggaaatcaaatggtaactcacatggaaagttatgtttaattaccaaaagactagggatctgtgaccagaaagtggggattgttttacaaccataatcctcccgtgacattgcatatttttacagtttcctccccatacaagtactcctttacatactcatttttttcttcttattgagcctctaaaacagtacctttaaggacagcctatattgtcgtaaattatctccacacactagggttccactgccaagtttttccttccttaaaagatgtagaggaggaaaacctgctggctctgggtttccatccctggggtgttgcctatgggcagcattttaaaatgcagcttctggaatggtttaggtaacctcagtgccattctttacaatgcaatccttgaaggtctgaagcagaggagatctgtgtgcgttttctcagtctccatgtgcatatttatcttgttttctttctccttaggtcaaacccaaaccagaagaagaagtgaaacctgtaaaggaaccagatatcaaacctcagaaggacactggatgctctgtctcttaagatgtcacacgtgcttagaaatctcgctgccagtccctaagataagctgcaggacttcagttcacattttctgatttctctgaagcccataggataattattaactttggagggacttggccttttgtttatttattcttgatttttaacatagaggtgtttcatacttttgtttctgggctctgcttttttaatcaggacaacatttggaagggttgttttatatttaatgagtatgtgggggttgggccttgtttgaactctagacagtttcatgttaatgtttttgtaccttcacacacacacacacacacaatgtttattttccttcttgttcaataccagaagaatgttttaagaagtgggttcacctcctcatgacttgttagatatgagactaactcagccttctggtaggaaaagaaaatcgtggttaaaagtcaaaaaaccttcagaccaaactctttccttacactcacagtcaataattccctagaaaatccgtgtttagaagaatgtggaacttagttgaaaatgggcagtgacaggtctgcagtctgctgcctggcatatgcttccctgacctgcacagtccggtgctcccatagtcacccccagtatccagacagtgattttttttttttttacaagtaccttttctaatgaatttttttacttaagggacaaagttttgtactagcatttggtgttttcttgtagacagaggtaaaaagaatggaaagtgtgttttggagaagtgaagcatgcatgttgtaaagaaagccttggtaaacttaacatagacaggttgtcctgggtcacactgatgatgcctttgttaaaagcatttaagaaaatgcccttggttacctgattttggtgtatacattgtgtttttaacatggttttcttcaatatatagcctatcagaattggctgtaggccaaggtggtagcagcaaaaggttaggatgtagacataaactatgatcttcaaagtgggttggttatatccacaaactaggaaatagcaatctgtgacactttgacaagtcacatatctgtagtatgtccctgcttggctactctgcttcggtgttaacttcttttctaagtggcaggtggctcacttgatagaaacaatagtgtacatgagagctaaccgtgtaccagccagtgtgcaggcacttagacaaaccactgcacccacatagcaacccttggagaaacacatcaatcacataaagtattgaaacgagagaagaagaatgaacagatgataccgtcaatcaagattgtattcaataaattatatactgtagtttacactcctttgaaaagctacatagaatcagggttttgttgttgtttttatagaaatgctagctacagcttacagtatctatttaatatttgaggctgcagctttcagaatacttgcagaaactactgaatgggcattaaattttattttgctgcctgtagaaagaaatactaaatttcacccttaccacagtcacttggcctaaatgccagttactgacaaaactttacccaatacttgcccctgcctgtttgctctgcctgggggacttattttaggcactattactcactaatctagggagtgagatttttgtggactgactaaactgccactcgtgaaatggaaacacataatgtgtccggtgcttctgtccagtgcagtaagtacaggtttgaaatctgcaactggaagcattcacatggtcagatgagaagtctgatgactgaagaggcgacaccagctgcctaacacaccccgttatatcaggttttgaagtgacattgggtatttggggagataccgaatatgaaacactggcatgaaggctgtagagagacagaactgtacattagtgttgcatgtaattcagactgggcaaggacagttcacatgctacttctgctcagtgtttatataatgatttctctttttatttatgaaaataaaagcaattttacttacattttcactgttttttttgtgtgtggggggggtgtttcacatacttagctaatagatttagtacagtacaaatcttacagtaataattttaaatgacatttgcatcggttctgtgcttcctgagttaatttccttgacatactttgtagacaagtgtttctgttccatctggcccggtagccgtctagccccaaataaaacacagagacttataataattataaattgtttggccaatggctcaggcttcttactggctatctctctcttaagtattaacccataactattaatctatgtatttctacatggccttatcttaccagagaacgcccagcatgtcctatcttcccaatagctacatggtgtctctcagggcaggattacatgcaactgggggcagggagtccacgggtacaggatggcgtctcagccgtgaggcccaatgatcctcctcacccccttgcacgagagatattcaatacaacgatcatgtaagggtcacatgcaggtgatcgcacttgctgtggtttcaagacatcaacaccttggtcatcctccaacaacgagttccacaaccatagcataagaggtcagacagcaacctcagaagccactgggccttgacttgggtgacccactggagaggtttaaataggagtgacaggatcagttgaacaatttggctgcatttttttttttaagtctaggctgtataggacacctaagatgacctttacaataatacagactagggcgggacagttgatggcagaaggtcttggggttctggaaatatgcaagataatttcttataacatatttaatatgagatttgattaaagagaaatcaagaatggctaatgcttttagcttgatagaattgtaaaggtggggtttaaatgaatccaccagacagggcaagatgccactacagaactggcatttattgagataggcagactaccaagattgatgtgtgtgtgtgtgtgtgtgagagagagagagagagtgagacagacacacagacagtggtgtgtgtgagagaggagagagagacagactggtgtgtgtgagacagagacagattgtggagtgtgtgtgtgtgtgtgcttagtgatccagtctaatcaggatttagaagtctgtctttttaacattcaagaaaagctggcaaggaggcagatctgtgaaatacacccagagtaaaaccctgatgtaaaatatatacaccccagagtcatctgtgtgctaacagtatttaagccacagagccaaagatcattaagaggcagtctaatattgaaagcttggacacaggacatggtctgctgatccacactgtgtacctgagagtcaggttttaagaaacaagtaaaggtcttctgaagaatcgaacaggtcaaaaacttgacacatggagcttttgacctaggaattggtgtaaagagagaaatgctaccaagatgttcaaaaataaaaccaaacattccaaattgctcagtattgagccgtatgacacactgtgaccaacaaggtgaattctgtatggcatattttcaagtgcccattaggtggcagaaaagccctctctaaaccagctgtgagctacagtcttcctccacctagtcttgctaggagtcctctgaatcaaagacgtacatgtctagtgaatgcagagtgctgttgttacagagaacagagactagtattttcttcagagccaacagcctgtaattcacagaggcgaacaagctatccagagtaggctgtaggtgtggttggctttgtttggaaagagatgtttgggtggtctaaggagcatgagttgactacaaccagtccgttaagccttatttaaacctttcatattcaagatttttagtttttgataagactgaagtagacaaggctcagaagtaaaaggcaaggaaccttcctagaaaataatgcacagaacattctagaactggcctgaagcttaagctttctgtagttcaccacctcactgagtcccacaaatgtttgaatttgaaagttagttcttttcccactcttcgtatgacacgctgatcttcaaatttgcctgcaagttggcgtcacctgggcagcttcacagacttcgggggccggtgggccccaggactgtaatataagtaagtggcctgcagtgcttctctttggcacttttatcaagacccaggtgactctaaagtcaagtttgggagctgcaggtttggttaatgctgaccaaagcaaagcttcccacagctcaaacaagtccctccttttagggcaaacacaagaacatttccacgtcagcacacacagggactcggcgtggcctcagttgggcgtgattaatttaccttctgtggaacagcttctagctgagaacaccaaaggtgtctaattacggccaggaaaggagaacatagggtgagttggaatttttattttccttggattgccataggatgtgttttgtttcacgtggcatgtatatttacttattcaacactatcatgattcatatattattattggtcttaacaaatttaaatggtgacttatttatttagtgctcactgtccttagaaaccaaatagtaccttcacttcctgtcactttcctggagctcctgtggagctcactggcactaagtcagggacaacaggtggaccctccaggtctcctcagtgatccccaaaggtgctgtatcctgtcattgtgcctcagaagaatttagcacatctgtctcccagacatcctagaactctgatcttaccagttgcataaactgagcattgcaccaattatacttggttacttgtgttaccaaaaacaattaaataacaggtggcttcatacatgagtgcagatgtgtgcacacacctgtacccagtcattctgtgctgctcataaaatagttctgaaatgtgagttttcagtcttttaaaaaggatgctaacaatgattaacgtgtatttctaccactgatgtgttcctaatacttccctttccttcataattttgatctcccttccttgtctccatttgttttgtctgtcatttttttttttgagagagagagagagagagggtctcactgtgtagtcctggctgacctggaactctcactttgtagaccagtctggccttgaacgcacagaaatagcctgcctctgcctccccggtgctgggataaaaggtgtgagccgccatgcttagcctttttgctttcttttagggtaattgttttcttttacttctgttagttatgaaattatgcattctaatttctttttttctagttatctttaaattgctcacatgcatgccaaataatctatcctatcttgtatatccctaaacaatgcttagaagctgttagctcctagttttaatggtctaataacttagcactgttttatcttcatattgtccccactgaaattgtgttaagaatcaatatttactgagatttctgttttcattcatttctgtttcttgcatatcactcatacaatctttcaatgaagacatcaagaattgctaaccattttttcacttcattctctcagttgttgttttgccagtaactgaattcctttcgacaggaattcactgtctaatagaccactgtttacttgaagttggccagtactgtaattgctacacctttatgagtaatcttctctttttctgtcaaattagttattttctgttgggttgtaggtgtatttcagcagtagtgcttagctagcatacatgaggctctttccaggattgcttatgaggaaacatttttttttctgtaattttcattatctatatctgatttcatgcctgttcatcccttccggtattctctgtttcccagtttgaagcctgtttctttcttccatcgtgaacagttgataagccatttcctcctcactcttcctgttcagtgctttcaaaaagacatctcttgtgctttcttgtctatgtttcatagctcacaactttggatttgtgttaagcacgtgtgtatttattccatactctgagagcttccttggatttcttcactgccttagatttatacccaagctttcctgtgttggttgtgtacctcatttctagagtttctgtcgagtcccttttcaacttgacctgttctgtggctgctacattttcctgtgtctttctgaacacagcagacacaggaagacccacttgaaagtttctctctgtactactcaagattctctagtgtaacagaatttacagaatgaatctatatagagagagggggatttattagaatgacttacagcttgcagtctagctaatctaacaatggctggctgtgaatggaaggtccaaaaatccaatagttgtttagtctaccaggctggatgtctcagctggtcttcaggatatgccagaatcctgaagaagtaagctctaataccagtgagggaatggacttgttggtaaggcaaggacaagcaggcaaaaaagcaaaagcttccttcttccatgtccttatatcagcttccagtagaagaggtggcccaggaaagattgggattcaaaatgtgtcttcctacctcaaaaatccagattaaaaatggacctttctacttagactaagcaaaaagccctcacaggtaccccccattttggggttttagttccagatgtagtcaatttgaagaataatcatcacaccacttattttattattcttaatccttggatcaggtttgttacagaccttgaatgtcactcatttgctgaaaaacatggtgcccagcgcagggtgctgttgagaggcaggcggtggagtcttgaagtaggacccagtgaaaggacactaggccactgggggcacacattaacctttcacactccatgttataaatctttccgcccaaagccacccaagccccacagccatgtgtgcgctttacgccagccgcctgagccctatctccacgtgggcagtctctgccagctgcccgagttctgcccgccatgtggatggacaaaataatacacagacttatattaggtacaaatgctgcttggccaatgactaggatttctcctctgttagctcagtcctaattatcataaatctatgtattttataagacttatgttattggatgctttccattgccgtcctcccttgccggtggatcacatggcgctactggaggaagcgaaggggaaaaggggggcacttcctgtttttccttgcttaaacattagtctccctgctatgtcacttcctgcctggaatcaccacttctctactacatttcccagaatcctcctcaactcctactcctgcctaacttgctgcctcattggccaaacagtactttgtttatcatccagtaagacaaacacatacacagaagcacttcccccatcagctccatctctctttgcttcctgttctccttttgaaacactgaatcaaactaaccttttctctctgtaagtttcgtatcccaaatagtttgttacagtaacaggaagctggctgacacaagactctgatggcttttggtcagctgtacttccctcttgatggtttgtttcttcaagtggtttctaagtttctgcaagtacgctttcatcagaggcgttttttagcaaagattcaggacaccctgttttgtccaagtatagctccgaggcaggtttgtctttgcattcggcagcattgtgggggttatactggttttgattccttgccttcgtcatagtacgttgtacacataatgactctgaactggctgtccatcagcatttggtctggcctacgttccagttgttttccaagagaacattgccactatatggtaaattcctctgctactcttgcaggccatgagagagtttctttagttcataagttacagctgcaacagtatttttattatcttagtttttcatgtgtagctcattttagctcctcattctcatggcatccatgactgggactctcctctcagtgttgccgttagcatccagcctcaaggcctgcatctgatttggaaactcccaggagctgcctgggctccagctcatgctttgcttcctccagttctgatcactaagcccaccccttcctgcctgtgtgcctttcttcctttctgttttccccctccacttccctctcttcttcttctcgcccttcctagagcagctatgagctaatgtttttctttgttaattttatccaggatttctgtgtgtttggaacaaaaaggagaattattccaaatcagctaattctgctgtacttgctgatataaccttaaaatatattaaatgttattaaaaaaataagtgtgcttacaacattggtgcctgctatatacactactaagctaatgatagataaggatagctagcttttattaaacattattttctaagaattgttctacctttttaggtctttatagtaactataaaagcttggtgcgggatcattctatattatctaatagataagaataccataacagacatatattaagtaataagatttttaaatataggtatcccagcaccaaagcctttatgttttactgggatgaactttaaatataataaaatcagaggcagaaagatggctcagcaagtaagtgtacttgtggccaaacctgactacctgaagtcaacccctgggagctttcatgcggaaagggcaccaaccgtcctctgacctccacactcaatgccatggtgtatctacccccagccccacacaaataaataaataaataaataaatgtttaagaaattaagtaagtaaacttaactaacttccatgtcacatttacttaatttttataaatgtgtgcagtcgggagacccctactatagcatgacatctattgggatgataacgatgaacacaaatggaatcgtgataggttattaactggtaatttattggggagttatactcacacgaggaaatcaataaccagattggcactccgatcggtcaggtcccagaatgcttcccaatgctggctcagcccggagagagcaagctcggctctccctcgctcttatctacaccctcctatgtacctgtgaccacacgcaaatgggcgtggtcagcagtaaatgtaatcagggtctctctctacaggatgtttccatctaagaaatcccctttggtccctttgttgtttttctttctcttccctaagcctcactcctagtgaaaacactgagctgtcctcacgtgtatgagttgcctttcccacacataaatggaatctcgccatgcaatgactggcttctctcgcttaacataacgctcttcagagtgagagtcattcactgtgttacaagtcttagttgtttgtcacttcgagttagtgagtagcgtgtcatggaccagataaactaccttttgcttgctcatctctatagatgatgctttgatttgcttttcagtttgggatgctcacaaatggaggcgatatgaatattcacatatgttagacattttttcattttgggggtagctatcaaaggaagaagttaaaagaggacatggtaaatgtatgtttagtgtttaagaacttaccaattttttttctttttttgagacagagtttctctttgtaacagccctagctttcctggaactcactttgtggatcaagctggattttaactcacagagatccgcctgtctctgcctcccgagtgctgggattaaaggcttacactaccactgccaggcaccaaaaggttttctaaagtgactgagagacttactttggctcactgatttagaggttttggttcgtggtcacatgggtttttggtggcccagcacaacatggtgggaatgtggcagaggaagcctggtcacacaatagtaagtaggaagcaaaggaagaggatcttgtaaccacactagagatggtgagacctgggagaatagagccaataaatgaggcagactaagtctcacaaagtagccaactttattcaaagcatcagacaatttatattgtgagggctaagaagaggcaccagcgtaaaatgtataaccccaaggcaagccgcacatggtggacaagctgcacatggcaaaacaaaactaaacatgttttttccagagaggaatataagtaaatagcaacagccagttgtaatgaataatctgaagtgaactcactccctatccactacacctgggaggagcatgaacacacattccaagaacaattctgtgttttaaagaaactggaggtcacagactcttgtcttgttttcctggagttttgtttgtttgtttgttttgttttgtttgtttgtttgttttgtttgtttgtttgtttgtttttttccccacgagcactcagaattctcctcgcataatccatttatggagcatgttccaacatgaccccatcagacccaacctaaatatcctaccatgttatagcagcatcacaggcgggagaccacacctgacacacctgggcctttggggaacattccagatctaaacaacagcaccttctcaccagcaatgtatgactgttccaatttcctcgcatactactcagtgtatggtattgttagtcatattaaatcctagtctcgctagtgggcatattttgacattttattaggctgcaatattaacgattaacgacacaaccatcttttcatgtgtttatttgctctttgtaactcatctttggtagtccactaaaatttactggtcatgtgagaattatactggattatagtaattcttcacatatagaccctcactcagccccctgctttagcagccatgacaggctacagaaaagacatgtaggcctgtgactcagcacatgacacaaggaaactccagatccccttgcctcttggagcctagggccaaaactgaacacaaagaaactctagacacccctagcctcctaggtacttggttcctggaaactgtttggccacaaaagaaactccaggggagaccaaaaactcccctgtagtctccaggatacagttctaaaaactattggtatctatgtagaacaggtcacctgcaagtaacaagacaaagccatagaaaccacaaaacattccctctcagtactgactaatgagaataaatggtacacaggtatttcatgccaaaatatgactttgagaaatcctcctaattattcccaaatgtcaacccatacctgctgatgtaatcctgtgacttttgtctttaaaacctaacagtagtcagggaacttcactccctctggaggcggttgtgtcagcttgctagacggggtccctgtcatggttggatgaacaataaaacattgcttttacagttcggtgggtctgtctccttggtgatctttgggggaatctttgagacttgggcacaacattctaaatatgcttcttcactgaaacagactttgcaaatattttcttctgtgcagagtccgtgtttgtaaatgttccctgtgtcatatctcagtgcaaaccagaatgattgagaaaattgatggtcaatggctcactcctaccagcagatgtggggtttacagtgattaaaagatcaggcaatcacgctgaacatccaataaccacatttttactaaatgaatctcttttattctgacacagactgaacattcctcttggatgtgaagagtcaagaccgctaataggattatctctgaactctgtctttaccttgatggaaaacaactagacacctcatggccctatataaacactgccctgggcaacttgtcctggggcattctgttttcaagtaactggggaatcccttgtggaggaaggccatctccagcagttatattcagaaatgagtgggtcttataaaagtgctgctcccaaaagggttatccactttgctgatggagacaccatagaagaatacagcacagaggaagatgaagaaaaagaggaacagaactcagcatttgactctgtaagcttatcatattagtaccagtgggaggatggggaataaatgagagatcgatccagacaaattatatagaaaatatggctttaaattcaggttttggtcaccttgattgctttctagatgacatataggcaatagacagccattggttagtaagttttctcattggtaagagagaaaattaaacatttataataaattttgaaatctctatataagaatcatcagtcaccactcttgatattaattatttaaaatttcttatcatagttatttaattgtcatggtatgcatgtggaggccagtagacaatgtgtactctttccttccaccatgtggggcctggggactgaactcaggtagtcagtcttggcagcaagtgcttttgcccacttgttaataattatactaaattggtttctctctatttttcagtctaaactttcatggggatcatacttctgcttttgggcaggtcgatttgcaagcaattcaatttctagtaagtaactattaaggtttggcttttctctctctctctctctctctctctctctctctctctctctctctctctctgtcctagctatgtattaattgattctccaagatagatcagacttccagctgttccatccactcctcagaattcagaaatgataatctggtcatttctaagtccatgtattaactgtcccaaaggcttggagatccttctatccaccttctgctattctttctatcagtagaccatgactaggatgagattggctctccaatgtaacgtcaacatcattgacctccacagttgtggaaaatacggagggtcattccctctgatcatatcactccattattattagttttagtgtagcttgaagacttactggttgttgccatggcacccaagccaatcaggctttcacactctcttcaggtctctttggatgtgagtttcctgagtcactctgtccttagtccctgagtgactgaaccacttgagaacagagattgcctgccagcacctgttttcttatcttgacccaaatttccttctttaaaagttcctgccatcactctagctatcaccctcagagctatgcaaaatcagcccacattcattcatgggtcaaagatgcaaataatgaagccaacagttaatccttcctgagtttattcttcatctggacaaacttccagtttttttgtttttaaagaatattgaatgctgcacttctaagttccccaatctcagttactctaatataaacatgagctctattggctcctcctggggacataagtgatatcttgtactcttatttatagctcatagaatcttactttgttctactggcatttttgacacaattggcaaatgtataatgactcatttccttctaatgtgcctgcttgtgaatgtgatatcgagaaaaattaccttttactctagagttgtgagaaaatataaaatgtggctctttcaaactcatctttactcatccattaaaaaagcattactgactgcttactgcatgccctgtaccgagctggactctgagacacaaagacaaatgatgtcttcatgggattcgattttcaatgaataatatagacgagtaaatgtgtccagaattgtaatgtgtgctcacaattgtcaggataggaacaactcggggaccagggacaaggaaactcaggacaactgacataaagggagggtcctgagagaaccacggaagtctgtttagctgaggaaagtttggggaccattgttatggttaataggatttggaaggaaggagttgccatagctttatgtttcctgccctaagcacagggcaagtaaaagatacaaaactataggatgagagcatcaggaatgagatgctcttatgctacaggatgagagcaaaaaggaatagtctacagtggttttcatgggggcttcggcttaggatgatacaaacttccagggcatggtggttcatgcctgtggtcctggctattccagaggcccagtgtagtatgacaggccatttgcaaataaatttaagctctcagcaccttggctgaccataatcttcagccatagattcagttcctcctagtgtttgttcttccttctagcttgtgaattccttggtgaaagatttgccgtcttctttgaacccaaataccagtatgtgctaaatgagtatcatagaagacaaaataaggtaggtaaagtcctgcttggggtgccggaggctctgagatgggtggggtattttactggttagatttctgcttgctttgactgaacactggcagaagcgacttaaagaagattgattgacaggttgacagactcacagtagcagggaaggcttggtggccaatggctccatagttgtggtggtggtgaggctgtttctttacatctaggtagaccaaccagtaaatggtttcctgttcctctagctaggccttttagccccaaatttccacaatttcctgaaacagcgctaccagctggagaccaagtattcaaatacatgagcctatagggaatatccaaaggttaagagtatggaagaatgttttcccatcttataatcaagccatgcaattgcactgagctcccacagccagactggctcccatttctgaagcctcttgcccctcaacaccctcacttagcatttacccccttcccgtggaatcaggatttcataagttgagtaacaaaaaagtagggtgtgaagcttgagattccttaaaaggcaaagcttcttacatgagtgtttctacaagagggagttcagagattggtggctgcccatgaaatttttccttctttctctccaaccaggaatgtgacaaggggagtgaagggactggaccacaggcccaggatgctgaggttcctaatgaacagtgtcacctgggagctggtggccaagaatatggggccatctcttccagagagggcccagtggcagattccagctcatgatggacaacagaagctacccatgcattctgatgccttgactattggttaccatggcgacagcacaataggcagtgcgtgtgagcttggtttggttctaagatcatgaatgaattctcaagaatccaagagttatatgtaacaaggaaagcaattttagagactttcacaatataaaattttaattgtcaacatctaccctgatgtcatcccagtaataaaaattctgtctattctgacttttcacaacagcagtgcctcatgggcctggaagtctgggctgccatttttatgatggtgctagggtccagtaaaaacaaaacgaaacagaacaaaaaaacaaaaaaacaaaaaaaacagaaatctaaatttaacttatgaatttcccttataataagtatttcattccatacagtcaactgaattagttgggacttgtttcaccattgtcaacttcatcagtacgttacccctttaaagaactttgtcaacatcttccagagttccattagaaaatcaataattgagtcctagaaatagtatgtgtcctagttcccttcatgttgctgtgataaagtcctccgacagaagctgcttaggggtgacgggtgttcatttcagctcacaattccaggttccagtccatcaaggcagggagggtcacagcagcaggagcttgagagacctggtattgtgaagttcacagtgagtctagggcaatggatgcatgcatgccggtgctcagctagctctctccttcccttcggtccaggaagcagcccttgggaatagcagcatccaccttaattaggccggaaaagagcatctttcacacatatgcccctggccaacttactctagaattccttatagagactcccttcccaggaggctctagattgcatcaagctaacaattaaaactagccacaatgtttgaagcagattttttactttaaagtttttgtttattttacataccaaccacagttccccctcccttcctcctcctcctccccctccccaccccatccctccctccactcctcagaaagcagcttatataacaaaataggattctttttggaagggttaataaggtacctcacagacaccaaggtcagataaacctcaacagtgtctagattagtctgataagaaactcccaatgtcggtccctccctttctcatgcgtcctgcgttggaggcagagggacattcaatagtattcctaactcctctgctcagtgactgctgtttagaacctcagtcccaactcaaaacagacaggaaacaggttctgactagctctcctttgtcctgtgttaatgcccagttcagttcccatggcccacaaggtagagatacattgtagtaacctggttacaggcccttttctcaatgaaggtgattctcaggaaaagggactaaaaatgatctcagcagacaatgctgtggacattttatgtgaaaatccaggaaagccagttagccataattaggcactacagtcactgtgtgtcaattatgctttttaacatttgtgatgtgccacgttgactgggcccggattaaagaccgtctgtgagactgttttagggagaccagcactcatacagtgtgggtttggggcatcatgtaaccccacccaacgcctgagtggggtagaaagcccaggatgggggattttctcctttctgctgccttcttgcttgagttaaatgtctcgtttcttcttctcttcttgtgccctgggcctgggacttaggtctctgtttgcccctatcccattctcatcccttggatcaggacttagggcatggcttgtcccaccccacaccattctcaggcctttggacttcaattgatttgttctgacaccaactttcctgaattctcaggatgcaggtggcagaccatgggatttcttggcgtctgtaatcaatctgtgagcctttttacatcatgtctatccaattccccataaaagacctacctcccgaactatctgtcatccgttcctcttactggttccatttcactggagaaactgattaataaacatagaacgagaaccctcgtttcatgggtttgcatggtttgttctcgctaagcactcttagttccttatctggcctgctctgttaattcagtttcaaggtgaagtggatccgagggttttatgacacagtgggaggggccacatctcacggttaagtattagttacattagcctacggtgtcagatcaaggccaaaaccaataattgatttactcattcttttctttcagagtaagctctagtggttatttttatttttctaataaaaatatctaataaaactatccactgacaaaataaatacttgtcaacaattctagggaactagactgtggtggtttgaatgaggatagcccctataggatcatatatgtttgaatgcttggtccccagttggtggaactgtttgggaagggttaggaggtgtggccttattggaggaggtgtatcaatggggcaatggctactctattcccagcatgtgccctctttctctctgtctctgttttctctctccccaccccaccccaaatcctgctgccatgttgtgaggacactcaggcagtacagtggactcaatgcattctccccagacccccaaattcatatgttaaaatctcagtgtcagtgtgactgttttagaggtggagccctgggaggtgtttaggtcattacatcagatacctcttgaaggagatttgagcttgtgtaagaggccagaggtagccagttatatgtccaccatgtgagaagacagcttttacaattctgaagatggtggttccaaaaactgaccatgctgacactgagagatttttgctccaagaactaaactagccagcccatggcatttgctgaggcagccttaactgaacaaggctatgaagagacccatgttgcatggaacaaaagtttgaggcaaacattcattgtgctgctcccaaccacatgactatgtctggaagatgaccttctagcctacagatgactgtagacccagtcagcagctggcacgcagcatgatgagagctcctgaaccaagaccttcaagctaaatctctcctggattcctgacttacaaaatatcagatcagaaacattttatcatatattttaccctcccacagaaacagttccaatacatttttaattcctacacattcctaggggctcctaaggagaactgagctcaacgaagaaccctaatgttccgagaaggcagatatttcatctcacccacctcaagactagactgaactcaccgagccatatcagatatgtcccctaccttattgtgagatggggaagcccggccacacaactgctcttctatctcctgctaatacagtctcttgtttcctttgccacctgccatttgcccagagctgtcttcattatacccaaacccaaaccaaaccaaacaaatgaaaactagttctctgtaggactagtcatgatcattttactcctggagagtgcacgtctgcagtgataaaactcctagacatcagcacccacttcccccaatggtattcgtattgtcaagatggctcagaagaagatgctctgtcattactatactctgtgaccagaaccaatacttctcaccaaggcatggtgtgcctgccacctatctagcctcccctcttttgtaaactcaaacaattttattaacattagggccagggagatattcatggatgtgattttcttgctgcatatgtggaggtcaaagaacaactttggggtgttggttctctctttccccctttacatgggttcaggggattgaactcaggtcatcaggcttttacagtaagcatccttacacattgaaccatctcactggcccctctccctctttctagttgataaagacctcctgagtatcgcactgtctcacttttgttactgtcatccagtctatcctgacctgtttacatctttgaatgctctctctctctctctctctctctctgtgtgtgtgtgtgtgtgtgtgtgtgtgtgtgtgtttgtgtgtgcgcgcgcacgcgcttgcgcgcgtgttgagataggatttctgaaccttaggttgaccttgaacttttcatgtggccaaagatgatcttgaattcctgatcttcctgcctctacctcccaagtactgttatcactggcctagacaccatgaacagttatgtgctattgggatcaaatgtacagtttcatgcatgctggcaaacactctaccacctgaaacccatccctagttctctgcatctgtgagccttgaagaaatcacacttctagtattttgcttctcaaaatgtatctctgcccccttgtaaatctatgggtgctaaataacatacggagaaaatgtattgtctagctctatctggcagcctccaaggctccatgacgcactcagaaagggagagtagctagcttcctctttcagcaacatgtgaaccccaaatcttttcaatccaaacagatcctcagttaaagtaaatcatgccacaaagccatctgaatgaatctaaatttaaatgactttctgattattggtattttagattatcaacatattttattgtgtgtaatgtaggcaaatcaaggttaattgctaatgattgagacacgcaaaccttaaccttcagagtagcaattgggaaagtccaaggtgaagagagaagctctttgatggatctacacaggcatccatcctttatcaccaacataaatcattcaagggcctttccctgaataagcagtcctgccaagaagagctgagccttttcatctttgcaggctgcttggtgacgatgtccttcaattatccccataagattttctatcctctgccaaactgcaccatttccacctgtaagatgtaattgcttcttataccagcagcagagtgaagccaggcaaactttgaccattttttatccccaagtaccttatagagctttgtcacaagctagcaaacacagcagacagcttttcaagcaagacacggggaaagccgaggagctctctagagaatacaaggcaaagagggtggtccattgatcaaggttactcaggtgggtagtgtccttattaggaaaaattacttgaaaggaagtattatttctttttacctgttttcttcaaggctgcccataagctaaccagctgtagaaatcaaggcaaagtaatagagacaaaattttattcagaattgagtgaatttctgtagaaactatgtcttcatattaaatattcacgatagtctttggttatagtgaggggaactttgttttactatctggataagatggcatcttcccacaggcaagatggctcctaagaatatatcaatattgcttaaaccttcaccttcaaattgtaagcaaattggttcctgaaattgtatatggagtacacatgcaatgtaaatgtaatgcgaatttgggacaactgactgaaatatctactttcctcattggctgctgtgatgtttggctcattgaggcatctttcttcatgagaggaccacaataagtagcccaggctggcctttaactcaagatcttcttgccactgcttcccaagtgctgggccaccatgtcctagttccatgtgtcatcttgacaaagctctaggacccggatctcggagtagtgatctataatgtaaagatattgtatagataatggttaacatcttcaatcagttgactctaagtaaaagcagttatgttcaataaactaggtggacctcagccagtcatttgaggcctatgaggagcaaaactaaggtttctgtgaagggaaaaagtctctctcaaaacacagcaggtaaatggacatgttgccaaacagtcctctaaatactgaggtttattcttacagattaatgctcttctcagccttggtcaggagaactttattttgcagtgggcatcagttaatgaagagactgtaactagtcatagtactgagaataagttactgtagagtgctcagccctaaataggacagccacagcatctcctattttcaaggctcagagaacatcacggaaggcggggtggggtagaatataaaagttggcgaatgaggaggagcgctgggaaatgctgtcttcaaacaggacatgggtgctacactcacaagtgaacagaaactatggctaccagcacaagacctgcacaagacggagcctgttagcattctggcacgggtgggggaagggcagataagagtctcccgctatccaaggagcgcttagaaatcagtggctactatggtgagggggagttgcttttctttaatggtggaccctaattaaacttagtgggccataatgaaaataggaggggatttgttggaagaaggggtccagagggatgttaacggacaggtataggaaagggtaatggggttgaggatgatcaaaatccgttatatgcattaatgaaaacaaaaactacaggatgaaagtttacctgcatttccagcccactagcctgctgtctagattttagacttgccaggcccatgagtacatgagcctgcacctccaaataattccctttgagtctatctccctggagaactctgatggatgtagctggcattctacaggccttaggaggtttccactaccatatttagtgagctactacacctaccagctggcccttactcccataatgcaacatgcagaacagtgctgggatctgtttcatacagcttagatttaaacatgctagcactcctccagaattacacagaaccctttatcttggctcccctaggcccactgaatgatatccaagactttcctatttgtgaagaaacacctagttctgtgttcactctactcacagatcagctgcaaggatgtagagctcagtaaaaatgtcaaatcctctgtccagctgacttcaagacaatgagcagataaaagacaggcccagagactacaagtgaatgcttggaatgtgtcttggagtgcaaaggaaatgcctggtgaatattcaagagagttagattttaattccagtttcttagcttgtatggcctgtcctgaaaaggactaataagcacaggcctcctggaacagagtgatgctaactacaatgctgtgtgtaatcaccgttccagggaaacggcatggttctaatgatctcatttactctgggtaggcaataatattttttctgggaaaagaaatatgaagtgtcaacttgtttctttcatgtgttcatcttgatgtctctctttccacacctctactttgcagccacaatatgactttcatgagaaaacagggtatgttcaacacctcctacgatgttagctttaattttcaaactgacacaacctagaatcaccaggaataaagtgtgtgtgtgtgtgtgtgtgtgtgtgtgtgtgtgtgtgtgtgtgtgtgagtgtatgcgtgtgtgtatgtgtgagtgtgtgtgtgagtatatgtgtgtgtgtgtgtgtgtatgtgtgtgtgtgtgtgtgtgtgtgtatgtatgtgtgttcatttcgttctgttcttgacttcttaactatggctgtgatgtgtctagttatttgaagctcctgccttgacttccttacaacgatagactgtaacccaacattatacactgaaataagcacttttatcccctgtattgattttttatcagaatattttatcacagtaacagaaaaatgaaatgaaacaaaatagctcttaatatttattcacaactacatatggctcttagacagggtaggtgtctgaggagacagggtagatgtctgaggagacagggtaggtgtctgaggagacagggtaggtttctgaggagacagggtagttgtctgaggcgacagggtagatgcctgaagagagccatttcaacaggttaaggacatgatcgtaatatcccagatcagggaaacccagcaaggggaatccttgactgctgggttcagatttaacaagaaggaggaaggcagcgtagagtcagagttgtcacagagcgctagctacaggtaggtagacactgaaaggaagggagctctgttcacaaagtgggtggatcagaaacttaagtcagggtgagagggaaaggttttctgtcaacttgtccccatattgttagcaactagttttgaccttttggcagataggtagaaagggcttggagaagggaagggtaagtttctcaccacatgtggcaacttgaaggaacttcttgcatactgtggaaaagagcatacagtgggagacagaacaaatggagtcagccctctggctgaagacccacaggtcacctttatcggtgccagaaacctagagctggacaagccctggctaaggagttgctgatgttaattctagtcctcactctgctactaagaatgtgtatgcttttggaaaagtcatttaattcctctgatatcagttatcttatctagtgtttattattttaccttctgtatcttctcctgggtattaatacattttctataaaaagagaatctccaaaacttaatcttttggaagagtttggttaaacaaaatgaaaaatgcttatccttcacgcattaatgtgtactggcaagctgcaaaatgcagataaactatataattctttccagaaggatctatgatgagataatctaagtatggagtaccccaagaagtagcaacctaaggagtctgctttgagaagctctaagatatacaatttataaaacagctattaattttaatattctcattgtagaaaactggaggattgccaggaaatgggcattttccaggtatataagtgacatgctgaactggaaaacattttgcttttatttttactagcttctctggtggatgtttctctctttctaatggtatcaccaccctgtcatgcaagctgaaaatgtcagtatatttgggacactatactgacttgactctcagctgtcaatctgtccattgcaaaattgtgacaatttatcctttacaatagctaaaaactcatttgatgaacacacacatatatttataaatctttgtgtgtgcacatgtgtgtgatgtactcatgtctcactgcccatgtgtggatgtcagaggacaactttggatactggtcctcatcttccactttgttgaaacgggggcgggggggggtagggggggcggcggctcttgctgtttgctgctgtatccacaaggctagctggtcctgagcacactggatccgcccatctctacagcccttctcacttaggagcattgggattacacatgtaccacgctgtgcctgtgtttccatgggttctgcagatccaaacccaggtccacatagccagggctctacccactgagccatctccccagcccctgggcctatttttgattgctgctcttgctcgtagaattcaaggctcccctttctcatttgtaaatcaaatcagatcacgtccctccccgatcaccttcaagaatcccatgtgatgacagaatacaatgttaagtttttcaccctcatttctggacaatgcccagcatgtctctccttcctgtctcaatgggccaggtttgtgctccctggaaatggccttctgtcatgatttttcatctctgcatacttttctttccatgggttttctacctctcatctcttcccattaaggcactcctcgggagcaaaaacattgtatcactctagactccactgtcttgtcacctgtttgaaacctttccttgtgccctaatctagacacatgttctcccttctctgggcttcacttgtacatctctgatctgatatgctctgcctggtgtggtaatgacatattaagccatgctaaccattcttcagatggtgggtttgctcaacacagagcatagtgaatggctggactgggcttaaccgttccgaagctccttcagtccctcagtttataccacagcaatgatacaaatacatcaatgtgcgaagaagccaacgctgggacaacagaaagagctttgttgaaaattagctgagcaggagatgggaggcaagttcaatctgcctacatgattgcctagggaaggggttcaagggcttttcagagtcaaccggtctaacattatcttgagccttgactatatctttttttgtttttcttcttttcaattttttgattgtatcttttaaggtttctactattctgttgctggagtatcacagtcagcacttttctcttagctgcccgttctgaacatagggctccactgggctgacacttcaattctatccagttcagggtcatcctaagatccagtttggaggtgcctcctaggacatgccgtgcaaaaccttagaaaggaggcatttattttaacatgtatggaagaaggagaagaacttagctccattttgattgaggcaccttgtggggagcagaaggaagaggactgaacagggtccaagaagcaaaagtacaacccgccagtggctgggcaggaacttacataactgtgtgtgccagccaagtttaaacaaaactaggatcctgccttcccatggagtcttggagctggcaatcttacctctatggatgattatattcttcagaatgtctctcactcctgagagagtattcttgagttctagatacatagtaacacttttgctaaaatcttttgcaaacaaggatgaaacaagggctcagcttcaggacctcatcccttccttccttcctcccttcttcctctctccctccctccctccctccctccctccctccctccctccctccctcccttccttcctcccttcctccctttctcccttcctctctccctcccttcctttgttccttccttcctttcttttcttcctgtcatttatttaacacatatttctatgtgccaggcagtaactaacctaaacatggcagacgcccaactctcttcaatctcttaattgcctcagtcaagctatagtttttgaagatgtcccaatgggagtttaccctcagtctcccccatgcaccctgagccacccttctcagagtggccaactactcctgcccaggtgttaagcattctctcctttgagatctttcatcttccttaaaacccagcattaaaacgcacctgtcctttgatcaaacctccaaagccttgcttccagccccaacctattaagactgcagaacaagcctgcactaaacactgcacaaagcccggtgcactcgcttgagtattatttactgtaacctccgtgaggcgtgccagaaatacacagaagtccccagcgctcaaggctgggaagatgcagcaggatgataaataagcctagatgatgatttcaatggatggtaatttctcgcttccacggagactctacaaacacagctgtcagaagtgcattgtgtaaatcagatgctaattaaattaaattcccactagaatcaaggcagcaaagtattttgtcttgttttcttgcaaacggggcctctcaatcaagacagctggggcaccagcgtttcaggtacctgggagcaacagctgcagcgaggcgagactactgctttcataattaagttgccgtcaggaagagggaaatagatgccagtctttatattatcagtgatgctaaaaatgcaaaaagctggtggcaccagagcaggactggggaggaggagtgggctctgctgtcagttttatcaaaaccgttttactgctcaaaggtgcacttccttgcttcccccatctctcctgcattttcttcttgatgttgtggagagctacctgctgttgggtgacatattggttcctggaacctgggagggtccagaggcattctctttttgaagaattaggtggtaggactctgagattcagggttcgggcattccaagtgttgattttgattaatgtgctgtcaaccctgcttttcagtcctcagccccagctctctcttgaagcagccaaattcacattcctaccccgggcatcagttctgagagtgtgactaaaagacatataagcaggaaaaaaatttgaaatagttcacaggcacagatatgcagacataggaaaatgctgcctaattcatgtagagaacatagagactggagcttagacaagtacatggttcttgtaggttttaatttatttattcactcttaaaaatttacatttattttcttggggagaaacatattgtggtgctgccccattttgttgctgtcctgccccattctgcagctgctccccagattaccacaagggaggctcatattaattataaaggtttggctgctcagaagacaaattgcaagagtctcttttcttccactgtgtggatcccaggaatcaaactcgggtcctcagacttggtggcaagcccctttacttgctgaaccattttgccatccccacttgttcagtcttgaaatgttttctaattactcaccgtgtgccaggtcctgtgctgagggtaccaagcaagagggtgtctgctatgaaggagcttccagttaattggagaagaaatattttttttaaattaactgtaataaaatgcagctagaccaattatggagtcattaaaataggacatgcatggtaggaaagtgtcttttaaaaagaagcaaactcaaattttaagtattggaagtatgctgggtctggggaaatggctcgttaggtagatttaaaaccatgagttaaattccttgaacccacatagtgggaggaaagagccaacttatgcaagttttcctctgatctccataagtacactgtggccagtgtgagtccatgtacatagtgcacacacacttataattataagtatgtgttttcaatatttaaagtattttaaaatattgtatctcctccattatttatttcaatgtatgctatctttccattctgtttctagagtttgtgttccatacagcattctccatcagtattttaacactctagatccaaaaggaagataacgtgtgtgtgtgtgtgtgtgtgtgtgtgtgtgtgtgtgtgtgtgtgtttgtgtgtgtgtgttgggggggtatggtgtggtgtttattttgtacaagatacgtctcagcagaatgtagagattcctttcgtgaatacagtctgatactaataattggttcaaaaatgcacagtgttaaaatagagaaatctacacaatggaatataagctagtgacaaagcaaaacatttccctcccccccaaacaattacaggcaagaaaaagcatgaacctcacattctgctgagtgaaagaagctttaaataaaaggtagcatgcagatcccatgttcaccatgggattttactaacatgctgccctggaatagcccaaatgccattttggggaaatcgggatagtgcttggccccaggaagtagaaggctaggacagtaggagaaggggttgattttgggatggaatacaagggggaactttcgaggcttgtggccatgttttatgtcttgatagcagtctggatcacatggttttacaaactgaattacacaacgcacaattacaatgtgtgtgtctggggggctggggggagcacagactgtaaagatgtgagttatatcttcagaacccatgttttgttgtttgtttgtttgtttgtttgtttgtttagcttgaaattatggtgtgctctggggaggcagagacagacagatgtgaatcccatgtcccagtgagaaacctgtctcaaaagggaaagaacaagtggatgacaccagaggaatggcatccaagtctgtcctctgacctctgaatgcaccatgaacacacacatgcagtaaacaaaaaactgtgaattttttttttcgagacagggtatctctgtggctttggaggctgtcctggaactagttcttgtagaccaggctggtctcgaactcacagagatccacctgcctctgccttccgagtgctgggattaaaggtgtgcgccaccaacgcctggccaaactgtgaatttttaaaatacaaagtacactgcaaatagaataaatataaaatatggagccttaatcaatgacccatacattgcaatacttaaggggaaattcagtgatgcctggaatttactttaaatgcagaaagacagtatgattggtggatggagggaggactggagagctaaagatacgatgcagctgtacactgactacaatattagtgttggtacggctgggggcataagggtattccccaaaatgctctttcatcctggtggtattgttgaataaaacttgggcatgggaaagcaacttaatgcctctaaattactgggtatagcacctgcttgctgctctctctgggaatggtgcatttttctgaggttataagataatgcccatcacctaagatcctgtaagacagtggttcctagttacaggagcatggaaagaccccgtgtgagattttaaaatccacatgttatggacacatgaagagaggaagccttgatgtaaatgcctagaggagtcttcccaaatacatcttacacacgctcctgctatgcactcctgccacaaggaaatgaactctgtccagcaaatgggtccaacataaagagcatccatcacaacagttttcttcagcatcctttggtgatttggtccttgactggcagttaccaactcatgatgtgaagaatggatggcagagtaatgggggtaaaggcatggcagcctcttccctcctcccagatggtgtcaaataggcaaccaagattagccaccacaggtctttaggatttgtactctgaacatccatctagtggcaaatgctatctattcctcagactttggtaggagcaaaaaatcccccaagggtcctgtgtcctattcctttccattctgcagttcatttctctaccagaaagttgattctgaaacgggagccctcactttgttttgtctacctgatgtgagtctccaataaggttttttttttggggggggtttcgagacagggtttctctgtggctttggaggctgtcctggaactggctcttgtagaccaggctggtcttgaactcacagaaatcctcctgcctctgcctccagaatcctgggattaaaggcatgcgccaccactgcctgacttccaataagttttgaagccgattttcaagtatcaatttcaaaagaaagaagtggattaaacggaaaatgtgagagggtaggtggtaaaacagatagtcacttggaatttacgttttcaggttcatagctataaacatttactgattctccatggaaagcttctttgtctggctcaaggttaaatggtttgcagtgggcttcagctacagaagttctcagcctgtggctcatgacccccacaggggtcacatgtcagatatccagcatatcagcattgacattacaattcagaagaacagaaaattacagttatgaagtaacaacaatataatttcctggttggggggggggtcaccacaacatgaagaattgtactaaagggttgcagcattaggaaggttgagaaccagtggctcagcaggtaagagcctgtagtgctctttcagagaacctgagcttggttcccagggtcagtggactctgtctcctgtaactcctgatccaggcgatataatgcccccttcgggactgtgagggcatttgcactcacatttgcacatacccatgcactgacacatgcaaatacacataattcagagataataaaaaaaagggggggctgcagagaactcctctttcccaccgtcctgaaatgtacagtggtttccaatcagtggtcctgttaggagtaaattctgtgtgataaattcttgttagatgacagagtcatgcagtatttctttatgtgtgttaccaaacacagacacagagtaagcagaaagggtgaatggactgaaagatttctgacccatctgtcttgctgctgaataatcacttccctgaagggctcgtgtcgcctgctaagttttgaagtatgtagcccagtattagtttaaccatgtgacttttcttcactaattacagctattctgtatttattatattctgtagttataaatcattttcttcctcttctccccaaagacaccctcgctatatttcttaagcccagatgcaatcatctgaaaacacattttataaagctttggagcgaggaacacagtggggacagacgatagaattgtgttgtgaattattaaagacatcacacgtcatgggccctgagatgataattcaatcggtggtttaaaaccagactctaaataaaggtacacacatacacacaaacacacacacacacacacacaaacacacacacacacacacacacacacacacacacacacacacacacacacacacacacacacacgagagagagagagagagagagagagagagagagagagagagagagagagagaaggggggagtatgattcttgtgagtggtattttcaaatatagtgttgacctggtagttggtgcaatttttttcggacacagccaggtgacataatattgcagagtgtgcaaaaacagttccctagcctttcagtgtatgtgctttgattttgaagaagggaaggaatggtggcagttatgtgatttcagactgatcttcaagaactttctcagggatcaggagatgtttgttctcctgccctcacctggagacagccacagcctgaagtctgagcactcaagcctaccagcctggaattttattttcttctccctctagcttctttttatcactacagagaacttgaaaggatgacgacagtgtatctatagatccccgtctctctcagttcacggttattcacattttctcacatttgctttctgacatgtataaaatcgattggaaataagtcacagaccttggtgactaactcctaaatacccagttcaatgagatcttctgatacagagcctaatctcaatttgtctgattgttctagaatctgatattcttgatgctgtgtcaaatggaattctttggcatttccaatttccaaactgaacaattcacttaaattggcaataaggcttctttaccccatgcaaggggccaagttccacctggaactgtatggtaataatctacctccagcccttaaccctagtatttaaggaccagaaatcacacaatacagagtgattgcggccagcctgaaagccctcttgggggaagcagttcttttagctctgagtggctgagccttgaagctctgggcttgggggtttccctgcaaactagcctctgtattacacgccttctgtgctgtatgggcccgcacacccaaagccaagggcaagtccatcttccttacaacagtgttcaaggcccttctggaagtgacttccatgcttttctccaagctcatcttgttctcttcctaatatcctatcctctcaaatgatgttcccttaaccccatggccactgcatgcacatatttcttctgtccagttgacaatctgtctactttctcccccaggtccccgcagtgcctcctctgaacatacttctctctcatccaagtgagctgtttttcctctagctcccacagcacctctctgggctgtcacattccatagtaatttccagaccaaaaggccacacgaatagagataagtctcctcagtcactgcctggcacattcaggctgtgtgtgtgttcacaccgtgcttaggtggttgtctccatgttaactgagttgtcttttcttggggatctaggtgccttgtcattctgcattgttcaaaccctatctcatgctatgagtggacatagggcccatgtgacgtagtaccagaatccagaccacttgaagttatgctcaaaatagggtgtgaggtcagaagtgaccctcagagctgtagggtgaagaaagtgcaggtgtgaggtcggaagtgaccaacacagctgtggggtgaagaaaattcaggaagctcattgatctggctgagcagcaggctcagatgcccacgctgcatgcaccccttccagatggagggcctttgaaggtcctggtgatggaacagtgtaagcaatcagggaccttgtgaccattgcctagagaagtgagtaggggaggtcatttcagggagaagggacagtgtcacaaaggccttggagttatgaaaagtaggtcatgaaataacacaagagtggctggagctatggagcatgaagggggggttataaggtatgagccaggactctttgggttttattcttattttctttttctttttctttttttttttgtgtgtgtgtgtgttgtgcatgttttacatgcacgtggttgcaggtgtatttgcaggtgtgcatgtgtgcacatgcatgtgaagacctaaggttggtgtcaggagtcagcttcaatcactcttccacctttcatggaggcagggtctcttaatcaaacccagagtccatcatatagctactcttgctaatcagcttgctgtgcggatcctgttgctgccttaccaggcttcggtaacaggcagaagccacaattcccacctttcatttacatgggttctggagacccaaattccagttcttacgcttgcatggtgagtgcttaaccactgagccatctttacagacccatgtttgacttttaagatggttcctattgggcctagagagatggctcagttattaagagggcccaggttcaagttccagtaaccacatgatggctccataactgtctgtaatttcagtatgaagttgtcaaagaataaaagttcggggctggagatatggctcagtagttgaaagcaccagttccccagaaccaactctaacaactctctggaactccaatgcagagggtcccacagactcttctggctggccttcccagacacagcatgtacatgctacatggacatatatgtaggcaaaatgcctattcacataaaatattaaaatgactcttagaacttaagatgttcattattggtaattatgctaatggttttaatttgagacagtttgggggcaccttgggctgctgataacaagcagggaggcacctggtgattcttggccatatagacaggcgccctggaagggttttgagtcaggcagtctcgtgccttgttcccgttcatgtaggcaagggatccatatgtgaatacacgaatacagactgcagtgcaatgctttggtattagccacagccttgctctgaatggcactgaaacagcagctaagccctttactgcctctcttcaaagtgttccatggttgcacagaaggaggtcaacaggggtcattagactctatctccacatctcaggacatgtaaggacattctccacttcaagttgttgggcagatcccaacagagaacccacagcaaacaggttaatcagatgttagtatatgctctgcatctctgacttctgggtaccaaaacctgggctgtggccacccagcagagggaaattacacctttggaaccctaaaaaaaaaaaaagaatgatggattcatgacgtgagtctatctaggaagactgactcaagcacttcagagcaggtggattttgcaggcagatgttactaaaagtaacatttaggcttctacatgactctgtaacctcaggcaagtttttaaccttggcagcaaaattctgacagggaaaatgtgaaggaccatgatctgaatgtccctgcctctccttaaattttgaaggtaaatcctaaacccaaaggagaaagcggtaggaggtgattgggtcataaaggtcatggtaatgagattggagcctccctcaataggtcaggtgctcaagggagagagagatcaaagaggcccagagagactccccaccctgtccttctatcttgagataatacagcaagacaacaatgttctgtaaagtgggatgtgggcctgcgcctgatgcgtgatctgctgacactttgatgctagacttctagtgtctagaaatatgagaaagaaacttgtgttgttataagctactgattgatatctcggtgttctgttatagtatggcagtttaaatgtaatggccccataagctcacagggagtggcattatttggaggtgtggccttgttggaggaagtgtgtcaacgtggggacaggctttgagttctcatatatgctcaagccacacccagtgactcagaccacttcctgttgccttctagtcaggttgtaggactcagccccttctccagaaccatgtctgcctgaatgccaccatgtcacaccatgatgataatggactaaacctctgaaaatggaagccaccctactagatgtttttcctttttaagagttgccatggtcatggtgtttcttcacagcaataaaaaacctaagacagtacctgaaaggattaagacacaaagttgcacagaaaacatgaaatggcatgcttgaatatacccaccccagatcagggctcagcaggtacacccaactctgtaccctactgttccggcattctctttctctctttttgtttttatggtgttggaaatcaaacaaagtaccttccatatggcaaacatacatatatgtgcatatatgtatatatgtgtgtatctgtacatacatacatacacacacacacacatatatatatactcattaatatggttatggtttttgcccttagtcaccaatgatcctaaaaggtcacatgttccaaaatcccctgggtcacttacatcaagagttccatggaggagtattagagagaggaggggcaacagcaggagagagcaggggcacaagggaggagtgagtgtgtgtgtgtgtgtgtgtgtgtgtgtttgataaagcatattatggtggcaaggaaatgtcataaagaaaccctttattttgtacaataaatattaatgaattacagattaagaaatccctaaactttcatacacacatatacatatgtatacaaatgtgtatatgtatatatgtatagacacacacacacacacacacacacacacacacacacacacacacacctttcccagccttgttactgactcaggggcgaagaaacagggtttgaagctgctgtacccacactacagttgttctcttcacgagtgccccatctagctccctggcctccagataaagaagatggcaagtaaagcagtcactgcaccacaacaaggacaaagggaacaacctgcagcacccaggaagcaatgcaaagtttgcatcccacaaaaaccaaccacaaccattattccaagagcaatgagttagcacaagagactggggcaccagaagtgaactaggttgctagagaaaaggcagctctgttcccaggggctcaggggacaaagaaaagcagaatgctaattaaaacttagaagtctggagcaacgtggcagtgccctcaaaaaataaaagaagtgcagccagctgtggtagtgcatacctgtagtcctagcatggatgaggtagataaggagggtcagaatccaaagccgttctcagctacacagtgagtttgagcacatccggggctacatgaagccctatctaaaaacaacaaacaattgctatgtaatatagcaactgaactcttgaataccaaaagaacctaaaacagggacccaaggaaatatctgtatgcccatgtttagtattgcttcagtgtaatagttgctttgctgtgccccattcctcacttttgggatagggaagctgacactttgccaccatacgttagaagcttgcaacttgcgttctggttttacagaggctcaaagttaagagaggcaagtcatcatcgttagagtctgtagacttctgaagcctcgaggactgaatgcagtttggattataaaatgcctcgggcctatgggggcctgggtgggtcgttataacttggatgtgacacagcacacacaggcacacgtgcctgagcacttggctcccaactgtgtcactgtttttgggagtttgtggaacttcaaggaggtgggatccaacaggaagaagcagtcttcaaaagagcagaccttgaccttgagactagggcccggctcttcttctggcactctctctactcgatccgtctagatacaagcaagttcactccatcacagccatcacacgccacacccccgccaccataccttcctggcacttccatgatagcctataccgtagaactgtgagctagatcggccctgtgaggattgcctttgccaaagttttttttttttcccacagcaaacagaaaaataaaccaagacacatattgtcagctcttccacagtttccatttgaattccatcagcaatctttccaaacctttcccacctggaagcccagaaccctgactgcagaggccatcttctgtaaggtttcaataccacacacactttatgaacttggactcatcttttaatgtctcagagttttagtttcaccatctgtgagtcggaaatgtggccatactgtacctgcagtcaagaagcagagagagaagaatgttcagctgggtataaaaccatccaggactctcctttcagaaaacagtctttcctacaattaagattcttcttcttgaattagttaatataatcaagataatcctccacaggcatgtccagagagcccatctcccaagtgattccagattcagtcaagttaataattaacacaaccaccacacttggtgaaatttctctgtctctctgtctctctctgtgcctctttctgtgtctctgtctctgtctgtctctgtctgtctctctgtgtctctgtctctgtctctgtctctgtctctgtctctctctctctctctgtgtgtgtgtgtggctatccttggagctgtttttgcagtaatgagaactttagtggagttctcccctctctaatgcctgacacttctattttttattgtttcaaggcaaggtatttagctcaggctggcctcaaactcatgatcttcctgtttctgactccaaaatgctagaatcacagtcatgtgttaccacgcccatctcctggcacttcttgtgacccaccatttctgaggcaggcagacacagaggacttgtatgttctataaccagctgttggaatcaaacttgttcagaaaacaaaagtctgtctggctgccccactgccaggtcaaacagcctagactctaaccttcttcgctctacctgcttgattttattctttacaatatttatgtcagtttccaaatgaataaaggcaaatttgagtatcatcacacattaattatcattgttgctaggacagcagaactggtcactttgcagacttccttgctggtgtgaaagtcattcaacagtcatgttgtttggagactggtcactaggtgttgctatttgacagcacatcttcaacatttttcgggcatcacagcacatgtccttttatttatttctttcccacaagtactgagatttctaattgattttgagaattacccatagtatttcagactgattcaaagtcaagcacagaaaactaactgctcttcctcttgtttcctttcttcatcctttgatttccacaaccttggttcatggcagtgcctgcaatgcagaacacatctcaatccgggtttcatcccttcaaaaaatatttattggatattgcacatgtgcctggcattgaactagacatgaacaaggagtgctgaacaaggagtaaatgcaggagtgaataaaagagacaaagttttgaccatgatgcatctactctgattgctatcttgcacaagacacccccagtgctgaaattaactaagcacggttcaatgttttaattgtcatttaatttagttttaattgtcaacttgatccagtctagagtcacctgggaagagtctcaaaagaagactttctagatggggttggcgttgggttggtctggccggggcggggggggggggttaagtgttaactagtgtgggacaacccaccttgggtagggagctctggggttggaagtgcagagaaagggatgaccacgagaggcacgcatgtattcatcttcttcctgcttttgactgtggttgtgattggctgctggaagttcctgccttgacttccccataccttggacatatgggccgaataaaccttttcttgtctaagttgatttttgccagagtatttttttaatcacaggaacagaaatgaaactagaacacagacttacttatcttcctctacaccacactggagtcatccccagttagccaggtagcccagcaagtgagggtgataaggaatagtgaaagccattccctgttcaaacaagaaattccccatggaggcactagcaggttatctctgaggatgggatgggaagagtgggagaacaggagggcttctatagcagttgctctctggagacccaggggctgctccagatttggcatcacagagtgtaaaggctcatactgccaagctcatactaatctcagatctggagcagtcctcaggtccttatcccttgtcccttaagacactgcctggtcatccctggtgcctgagcccctctggtaacagccaatgtgagagttagaatccagctttttatttgcttctggagttggattcattgtacttagcctggttattttctgagcccacgaatatgctgcccatgctctgtaggaagaatatgtacatgctcagagacactaaataactcagattcctccttgtgaaacactgaagtatttcaatttttctctttccacccactctggaattttcagtttcaaagtaacttcaataatggctgatgggcagcattgttatggatgttaaaaggctttgaaaatgcttttatgatacaatattccttatatttttatatataaatgttaaaatgtctctgtaaagaaccaaattgtgcttaaactgtcattgccaaattaatgaacaatccaaaagtaattataatcctcagtaattataatgacaaatcttcttgtctcgagatttgttctacatgggcataattgtaactcaattatacttcaactgcctgagttgttgtgtaatgacactcatgaatggtaataccataggtgtttaacaaagaccgtttgatttttatcatgatcctgttaaaaactagttaagtatgggaggagtagagtggcatacacctttaaccccagtactggggacacagaggctagcgcatctcagggagtttgacataagcttggtcttcatagtatgttcaggccagcctgggctatatagtaagactgtctcaaaaacaaaacaaacgcaataacaaatcccaaaatgatgtggacatacaggatcaaagaaagaacattatggtttaaataatggttaaaaaatgaagctgacagcaaaaaattatagatgggtgttcgtttctttagtttgtaatcagtgcaattcatacagtctctggtcccggaggttgccagtagctaaaggtaagcagatgctttaaagtggtgccatgttagttagcttcagttgtgaacttgagacacctggggagagggaccctcaactaaggaattgcatctattggattggcatgtgggtatgtttatgggtcattttcttgattgctaattgatatgggagggcccaacccactgtaggagttaccatgtgtaggaggatgggcggggctacataagaagagtggctgggaatgagccaataagtagtgttcccatgctctctgcttcagttgctagcctagctttccaggatgagccaaataaatcctttcctcctcagttggttttgatcaacattttctcataaccatagaaagaaaactagataataatcttggatagtggggatttctggagaaaataaatcattctctcgaatgaactgagctgggttgaaccacccatttgaaagacttcatacatgtagagcgtgctttgccagtaactggttggatttgctatcccattaaagtttcccaaaataagggaccctgcaccagcctacagcagtgaacagaactcctactgggtacagtggtgatgtgtactgtcttgtgcttggatgtggcatacaagaacactttgccaggaaaggggttaagaatcctggttggccgagctagcggtacctcagattctggactgacacctggggaagctgcaggggaccaaactaggccctctgaatgtgggtaacagttatgtggtttgatctgttgtaggggggctggcaggggcaccaggacctatcccaggtgcatgaattgacttttttgatcccattacctatggtgggataccgtgacaagcctgattcagcggggaggggcttggtcccgactcaacttggtatcccagactttgatgactcccgaggctggccttatctatcccctctgagaagtagatagggatgggatggggggaggtggggaaggggaactggggttggaattaaaaaaaaaatcctgatgggtgaacaggactcagaaaacaaaaaacaaacaataaacagcccaagagcaaccccaaggtgattcccacacggctgaaaggggtgggcggagggcaggggggggggcaatgactctgcagctttaaaccaggaaatggctgtccagggcacagccatccatccatctctggaagacagggtgtattgattgtaaatactctgagctcaatttgccagaatcgatttttttttttttttttttttttttttaaggcagagtcacacaattcatccaggtttagaatctccactcaaggcctttgaaggtgaaactactggttggtatggactggaggtaggctaattcttcaacaggcatacaggaagtagagagaagaaggggagggggagaagagaaggagggaggaggcgggaacggactcaccccatgtgctgagtccctagctaaaggaaggccggccgagggttccccattaaggtaggttgaccttgctgggatggtgagggaatgcaaaaaaggataaacacacagacacagtacagacaaactgggactggctggtttggactcttggatggagaagcctctgcatcctggaagagcaatcctttgttacagtggaacatggaggcggggctattgcatacagctggacagggaggcggggctattagatagagctggtttagctaatctcttaggagcagctctgtcggggaggagtctgaacatccagaggagagaaagctcaatggatgtcgaaattcgtactcagacccaaggaaggctttgtcatctctctgagtctcaccagggaaatctttgacattctcatggggctgaggctttggagtccttggcatggccatgctcacgtcaaaacgacacacactaactccccacagtagatcatttgcaggtcttctcaggcttatttaccatttggtcagatggcatttgggttccaaattaaagtggttttgtttttgtttttgttttttgttttttttttttagacattcactcacgcctaaaggatcctgggacacttgttacattgacacagcttcaggaacacggagaggtcaggaagggagaagaggataaaaacaggcacacgtcgtcacatgctccatggaggtagggtggtgcaaaggcctgcgattgcctggcaaatcaaggtctccatgatccagtgcctcaaccaatactaccggttcctttcactatttgttattttcaagtatgtgtgtgtgtgtgtgtgtgtgtggggggggtatgtgttcgtaattgcagatgcctgtagaggcttgagttacaggtcgtaagctgcctgataggggtgttgaggacagaaaccaggtcctctggaaggtaaatgctcacacgagcttgtcacctctccggccttcctttcatcgtttctgcagggcttcccatttttttcataggacattttccacaggaagaaaaatggcccttagagatccatgctaaagagattttcagctaacgccatggctattagttactgtcaccagagtctggaaaagagagggtatgagaggcctgacaattacttttcttaagtttgcccgaggacccagccccttgcagaattcctgcccttaacagcattaacggtaactattgccctaggtgtcaaaggttcagtgatcacattaaaaaaaaataaaactgtctgcaagtaactggacaagcagatgtgttcttatttatgtgggtcgttggagattgtaacggcctccaagtgaaggtactgatcctcatttagcttatagagttgttctctgagctctacatgaccagtgacatgtgtaaacctatattcacacatgcatatccatgcatcaacatatatcacaaacacatacacacaatacacatacaacacacacacacacacacacacacacaaaatattcacacttaaatggcatataaaagttccattagctacttgtggtagctcatatttataattccagtactcaggaggctgatagaggattgttgtgatttcaaggccaagtgggctacacaatgaaaccctgtctcacaaaaaaaaaaaaccaaaacattattttcctttaggacttgaagaaagagatagggaggggctgctggagagactttctagtgattaagaccactgacttctcttccacaggaaccaggttcaatttctagcacccacaagatggctcacaactgtctgtgactccaatctcaggggatctgatgcccccttctagcctttgtgggcactgcacacacatggtgcacaaacgctaacacataaaataaataaaatcattaaaaacacatttttccaaaacaggcgtgttctttcttcagtctatgaataaccaagaagaatgcaaaatgactgagttggttgggtaacccaatatgctaaatgtctcctgtcgatttggttaaacagttatttctcttttcaaaaagtctgcattttatatcaagactggatgactttagtatttgaagcatttttatgttttggtaattttgtgactaagagtagttttatttttattcttaattttgtagctccacttctacagaatgactcatgttatactagcatgtaaaatatgagagagagagagagagagagagagagagagagagagagagagagagagtgctacttaaatgacgggggtatttctttcaagctgtgggcgctgcatgtttgttgaggggagttgtgattgctttgcccttgatttcctcactgggtgctttcccacaatgaacagtcacgctggactaagaagtgctgggcagttagttttctgagttgcccaagaccagttccctatcttttgtttgttttgagacagggtctcattatcatccttggctggcctggaactcattgtttagacctggttggtctcaaactcttagagctctgcctgcctctgcttcccaagagctaggataaaaggtgtgcatcatgacccctggccaactcctcattcttttgagtctcagttgtcatagtatttttaatgccactggcaattccttcactctctccttgtggcaccaactcctcctcactcattactttatcctttatcctctgttaaacttttattttagtaacatttgcattttaataacatctgcattttccagatcacctggcttggattttgatccactttagacagtagatgtgcacagttgaaacacttatttcttttgtgaacttttctagcatccattagcctaaaaccaccctctgttgtatcatgtgtacacatgaacacatacatgtgtaagcacactactgggctgggtattctatgtgagttctggggaccaaatacaggtccttgtgcgtgcttgtggggggtgagcattttacagatcaagccattttaattacattccttttaatttcaagtaaatgtccttgccaggaatatgtaacatctattcccttagtacacctgtgtttccaggagggtactctttcatgttttctcaccaaaggagcacaagctgcccggtgtctggctataatctctgtcagaacgtggactgtgttttgtagcatttgcatgggtggcgggctaaccttgaatgattttagtgagtccttttaacccacattctatattctcctttcaaaatgtctgggacataatggtagctagagttccctgtgtatgccttcttcatccagcacagacccccccacccaccatgttccagacgagaatgcagggtcctggaatccggatgccctgacaaggcaagccatggcaattttctcagactgggaaaactaaggttggttaacaatcatcctagagtgtacctgaatccccccaccccatgagttgatttagtatttgtttgctatccaccaaacacacttttacagagctaagtatgctaggccatgggagctagagaaggtagggttagtagaagtgggcccagagactctgagcagggactggccagccatagcagatacactgagaaacctaaggcagattctggaagcagggtaaacctgatcctcctgaccatttgtaagatgaaaggcctgggacagtgctgataggaaaacgctaggcccttctctgtctcaggcatctgatctccttccgaactccctgttggcaaactctaacagggagcacctggcaaaggagaaatgtcctcagggctcagtgtggagacaggtcgtaacccaagaatcatctttagcagagtctaggtctaacgtggatctgaaatgtaattaaggcgtattgcatgctaaggaacgggatatctagagtgtattttgattactccaggctcattctgtctaaaagaaaagaggagaggaagaaaggggagaaaagggagaggaggaggagaaggacttcgaaggagaggaggctaaggtgggtagggagtggccagggaatactcatagctcaagaaatggaaccagtttgtgccactggagagaacgttgaaaagggtatggacagaggttagcaagctctcagtatttgcttctaaatgtggtccacatgtctcattttctagaaatgttcccttaacattctttaagttgtatttctccactatcaaaattctacatgacaaaattaaagccgaatgcaagggagtcaaaactagattgactgcaggtagtttattaaagggacagtactcacacaagggctagtgaccaggtttacactggagccggagtcacccgcagatgtctgctcagccaggtgggagagaaaaaagaggaccatatgtgtgcctctcttcttcttaaacccttgccacctcactctgaccatgcccaaggggcacctgtggccatccccaagcaggcatggtcagcagtatctctaaacaggattactccctacatagaatatataagaaaaaaaagaaccttctatggttctgtcatgccccctcaacgaaaatacaattaacctgttgtcttagggtttctattgctgtgaagagacaccatgaccacagcagctcatataaaggaaaacattgaattttggtggctggcttacagttcagaggtttagcccattgccatcctggtgggacatggcagcatgcaggcagacatggcattagagaggtagcagggagttctacatcttatgtaggcaacaggaagtgaactgtctcactgggcatgatttgagcatgtatgagacctcaaagcgacacactttctccaacaaggccacacctactccaataaggccacacctcctgatagaggcactccttttggcgggtcattttctttcaaaccaccacacctgtactgtattttctttgaactttccgaaagaagaatgaaaatgaaggaagtggcttcttcacaaatcaacacacttctgcagggatagtgagtctcccctaaaagtgttcaggggcatccaacccacaggacacatgcggccatggttagcagtggcttcagcctaatgaaaaatcattaacttaatgaaaacataatgaagtttttagaaattgtttatttatttattggcaatttcattgtttcaagcatgagcttgtagatgacaatttgtgtcctgatgtcaagaggatggatatgtctgagaggcattgtcttaactggaaaacactgaccttggtgttttctgcatgctagggaagtactctaccacaaagctacagccctatcctgatgggggaggtccttctgtatatatgtttctcttattggttgatgaataaaacactgtctggccaatggaggcaggaagataggcagggctaggagaattctgggaaaggtaggcagagagagactgggaagagaagtcatgaagggaccatgatgggggggtaggacgtgccaggtgttctgcagtaagataaggccatgtagaaatacatagcttagtagttatgggttaataattaagacagagctagccaataagaagccatagctatcagccaacagtttagtaattagcatgtctttgcatgttcatttggggctgaagtggcgggaactggcaggataagaagaaacctccataacagacccatttcttgccatcctgagacccagcactgaacattcatttcttacctcgttgtgagatttctaagttagagctgtgggtctattttaattatcacattatggagtgcaattttacagaaaaaagcccccttttgatagttgtgttggaattgagtaggtaaagattttttgctagagaaatatccctgcttagctttgattttttttttttcagggaggaaacaaagtgaagtttgtatgccagtcactcatgtggcaatacccattgttgtatggcagtcattggtgtgggcgtgcccattgtggctgaagaaaagcaaatatgactacagttttcaaatgactaacttgtccttaggaacacacccacccagactctcagctaatgggcagaatgccaagattcctgctgtgtatctctctgacatttggaattttcattggtttcagtcatcaaccggtcagaaacagaaatgcctgattactctgcaagttgtccccgtggaaaccacctgcttaatttgaattccacaggagaacagagttggtaaaggcattatcttacatctagttagaaatatgtatactttaagaagaatgtgaggctggggagatggcttggtagacagagtgtttgctactgcagcatgaggatcagaatttggattcccagaacccttgtgaaagctgggtgggtatggtggtccatctgtgatcccagtgctctggaatcagagacatggtattcttggagcaaggtggctaggtactttagctgaagcagtaagcttcaggctctgtatggagaatcattatggaagatatcctatatgacccctttggtctacacacacacacacacacacacacacacacacacacacacacacacacccacctgtacccataggagaaaacaatatatacatccctaaataccacacacacatgaaataaaagtgtgaattggcgttgaaagtactgtattggatataccctatataatttgtctaaaatctgtgtgtcgggaagatttggtgttattgtttaacaggcatggagtttcagtatggaaaggtgaacaagtctcagcaatgaatgagggctgtgctggctgtttttgtcaacttgatacacactggagtcatctggaaagagggagattaattgagcaaacgcctccatcagattggtctgcactctaatctatgggacattttcttgattaatgattgatgaaggaggggccagcctacttcaggcaggtggtcctgggtggtatgagagaggtacctaagccttgaaacaagccagtaagcatcgttcctctatggcctatgcttcagtttttgtccaagtttctgccttgagtttctgcccctacttccttcatgatggtctcttaagttctaagctgaaataactctttcctcctcaggttgcttttgatcatggtgtttatcccagcaaaagatagcaaatgaagacagtggtgatgggtgagtaacatggcaaatgaactttctgcttcccacctaaatggtcacaatggtgtcaggctttgaattttgattatctcccaaagacttcttggaacttaatgcattggtccctgacatgtggctctgttaggaggtagaggaacctctaggatgtgggattaggggaaggaagttgggtcgatgagggtgatcccttgaagggaatgaagggatcctggctgttctctctttgctatccagctgccatgaggtgaggaggatctctctgccatgcccttctgtcacgacagactgctttgccataggcctcagtgaccaactggaacaatgagcaaaaacaaatcttttttccatacaagttatttgtttcaggtttttttttgttgttgttgttttgttttttgtcacagtgatttgaaagatgactaacacaaatggcaagattatattacttaccacaaaaaacctgggtcaaattatgaaaagccatgttcttaaatatttcaattgtctgggcatggtagttcttgtatgtgatcccagcacttaggaagtagatgtgggggaatcacgaattcaaagccagccttggctacctagtgagtttgaggccagcctgggctacaagtgatgactcggcaggtgaaagcatttgccatgcaagcttgacagtgtaagtttgctacctggaacccacataaaatagtgagatgtggtggcatgcatctgtaatccctctactcctttaacaagaatagaggcaaagatagcatgtgatcagaagcatgtggatgggctagctggggtaaaaaaacaaggtagagggtgagaaccaagtcccgaaagttgccctctgacctctacctctgagctgtggcacacatggtaccagcaaatgcactgaggtggtctcatgcacatttgtgtatacacaataaataaaatgttaaaaactaaacataatttcaactaagttgagacatttttgagacagtccacactttggaaggaaacagcacacctaagttagtagggagtcatcttttgctttattctgaaatgttactcgagcacaggacattgaggtcttcatggacaagcccttgccactaatcacctgtggtgctgttgggattattaattggagaatactaattcaccttaattagtatccaatccattgcttctaattgatatatgcctccatcaaatggttaatatagcaggaaataggctgtcgattttgccataatttatggtggtagtgcatgggcaaaggggaagggtatagttttcaacataactgctaatggcattgatatttacattggtggaaaaataagggtaagacaaattctatgcatacactgaagagattgtgatattcgggggtaagtctgataaatgattaaccatattagctccattaattagctcatttatttgtctgagacagtttataagcactggaaacaaagatctaggaaacatcttaaacttctctttccacgtttgaagtaaccttctgttacctgatgtctctagaaagtgtttctgaacagttctcataattctgtagtctagtgatgctattatagagacatgggtaaactatgaagaccaagaggccagcgggaggaagtagacgagtcttaaaggtctcacagttgcttccctgaggatagcactttattacagtttggatgagaaatgccccctcccccataggctcatgcgtttgacacttggtcctcagctggtggcaccgttctgagacgttgtggcagctctaggaggtggcgcccagatggagcaagtgagtccacaggagagaagtatgcaggccttgggaactatacccagcccggcttctggccacagtccctggtttcccagtctgcagagatgtaagtgagcagggtcacacgtccactgccctatctaccatgccttccctgctgtgacagattgcaccacctgaggggacactaccccacttgaacacacagctctggcaggccttgcccttcatcctatcctccctgcctagctaaaaatcattagattgcatccctaaagctagccaccaaggtctgctaccttatttggccacttcttcctcctgaggctgacaccaaggtccagaagccccatttggctcacctaattaatatgcccaattaaaattaaacaccttattctaacaagggattgcccctttacctttataaacagccatttgcctatgtgccacgtctgtctcctctctgtccagaggcagccctttgtctctctgggacaaataccctcactgccttccctctctccctcatcttctctctccttcaccaccatatcctagccctttctaacacacctcccttctgctcttctgaagagtgacacctgcaaggtattctgctgcagttttctgcctgactcaggaagcagccactttaccttttcttagtaaaggacctctgtgaaaacaggtgtttgggtgcagtttgtgtctaatcagaggcctggggatctggaagggagtcttcgatgtttgaaagacaccttcacaatctaaactacccccccaactcctaaagttgcttctttcaagttttatcacagtgataagaaaagcaatgaagctttttccatacagaaactcaatgcactgggatgatgaggactggaaaaatagagactgatcggggcttgtcccagggcctgttgagttgtttggtcttagggaaaccacccagcttggtgatgggatttagtctcccttcagctttatgccctcatcacacgatcctgtccacctatgtgattttattacctaatctgtcaagcccagtgatcattttgacagttatctgaagatctggcatccacaggaggacacaattactcctcctgtccttggctagggagagatgtggtctcctaagctcaggtaggtaggtcctatggagtgaacaattcccccgtatcctgtgaattgctgtctagttatataagtgctgggaattaacctattgacaacagttaagtagaggtatttgctgggagaatgcagaatttccttagttttttttttttttttttttttttttttttttttttttgacagggtttctctgtgtagctttggagcctgtcttggatctcactctgtagatcacgctggactcgaactcacagagatccacctgtctctgcctcctgagtgctgggattaaaggtgtgtaccaccagtgcctagcaaatttccacagaattgaaggccaggaagcccagcttcagcttgcaagggactgggcataaaaaactgggaagtttggacctaaggcgattacctcgctgataattctttttatacatctctctcctctaaatctccacttcttcctcattctttatggtcctcccccgtctttggaatcttacacctgtctaatttaattctaggtttacatgatgttttcattttgggatgcaaattgagaccaaccttagtgcagaagaaatttccctggccctgtttgggttaagggctaacatctgctctggttttctgtgagatgagatgggtacttttacttggtgaacatctggtagggcttgggaagcagattatcttaaataaggacatgagctggacacattccttaaggttatttggctatagatagaaaaatgctctctggatattgaaacaaaatgtcttggaaatacatacagacacttcttgtaatcaaaggaaacggcaagaacctgggtccttggcaaaggcgtttgttcacagatcttttctttagggtgttgccgaatgtgggattctcagttctaatggttatcttctctctgcatgtccctatgccatatttaatgttcctgagatgaggggttttaaagatttgttctaggatgcagcaggaaggtcatgagttcaaggctagcccgggtgacatagtaaaccactaataatgagtaaagtaaaataatagtaacagaaccaacagtccccactgctgtctgtgaattctcttctgttggttgaggcaatctcaaagatctgagacttcggagggttttttttgttttttgcattgactcattgtttttccatcatgatatggctgtttgagaaaacacttacagggaagactacatttctacccatggcttcttacaagttcttatttttgtctatccttttcctctggtccctgtccctttcctccctttcttgtgtatcccaggctggtctcaaatgggctactgatcctcttgcctctattgcctgagtgttgaatttccaggagtgcaggctgtgctcagtttatatgatgctggatagcaaccccagcgcttcatacacattgctaaacactaatcattgagctaaaatccccaggattctgtttttgtttttggataactaggaagtcaccctgggcaagtccatgattcactgctttgtctattctactagagactgcattgattctgttgtgtgaaatttgaagctccaagttgtttgcatcatctgaccttgcctaggtttgttcttgctggactgacctgcagaagacatgctctcacttccaggtatcctgttgctcatgcccttgcctaccttaacccttactcattcttttactcagtctcaaccgaagctgctgctcattggcagtcttcttgctcaactgtctgctccataccattctccatagcactgccatagctcttaacacgttcttcgggtacttgtgggattacagcttgcaccccaacaaaccaggttcagccacctctcctcaataaaccaaggaaaggacctgaattaatagtgaagagcacaaaaaggagaattagtcaatgttgctgcattgggaagagagataaggagaacgaacggcacttgtcttcaggggagtccatcgtcagggttctgacatgaaagtagggtttcatagaaaacaagagataaagataactagacagccggcaaggtgtggttctctgtccaccgttttcttgtttcgtgagtgatggagaagacaaatatctgaattaatgacataaaatctactccctcctggtgtgatcagccacagcttttgcttttctcaactttcaaccagagtgtggactcagaggtcagagcctgtctgagtcatctagtggacacttggcccagcctttgcagacgagctaagtgacacactggagacagcctgaggaggaggagaggctcgcgcatcccaccccagcccagccgcagcagccttgagcagcgggaggcccgggcccaggagccagaggcgggacttccggtcccgctggcgaccgcggcccgcgccaggcggaagcgcggctccgggccaggattcgcgagctccggctggagctgagttcggagcctcggtgtcccggacgcccggggaccgtgtggatgcttctcggcgctgcgtcgcccgctgccgcggttcgggggaggccggggaggcaggcgggagtcggcgcgggagagccgggactccggggtgaggacggcgggcggcccagggccgctgcgaggggctgaggaggccgaggtgacatcctccgtgggggtgtgtccgcgtcccgcggctggtggggaaggtggcccgggacggcccagggggctcgcggggagagcccgagagccagccctcctctccatcggggtcgaggatgagaaggacgcaccgacctaagccgtctgcgagaggaccgacccgccgcggcttgcatgcatgcccagcaagcacggcttactttgcagtagtttctttctctctcctaagacgccccgagcccccttcccgagggctttggagagagattctgcattcgcagggaaagcttgaactcttgctcacctacctccagcccaggctacctttctttgtcagactaacaggacttcacgcctttggttcagacaagcaagcctacccacgttttcattttggactcttctctgcctcgcgagtccaggttgtcccactttctttgtcgtgggatgaacttgtaatgtctggagaaagctagcaccttgatgtttgcactttacaacctactgtttgcttcccaacgtggtgacacatttttagatgttaaatagattggatttttgccacgtactgggcgtagctagggaaagcccgagtactgtcactgatgaaggctgatttgtaaggattgtttgaagtgtttcacgtctcaagagttagaatgttaattcaccccctcgcattcccgtatttgtcagtacaggtaacttaaatcttacttggtggtctgacctgaactatttgaaacaaatctgaaaacactgtatatttattaatatcctggtgtctccctaacttgctataagttcttggtgaccttgaatccgtgctctgcgcgggatagttattgtaataacggtatgttgactggcacagctgatatttaccagtgtagaatggtgccttaaacagcgctttaacaagttaaagaagacattgaatgaagtctttgttagttactgtgctaactgctatgttgactttttttttttttttgcatgtcttcattgcttcttctccttctcctcctccttgtcctcttcctcctcctcctcctcctcctcctcctcctcctcctcctttttttaaaaagctattttatgtgtttgggtgtctggtctgcctgtatgtctgtgctccacatgctggtctggtgctcagagagaccagaaaagggaatcatggtcccccagaactagagttgggagctgcatgtatgtgctgggaatccaactggggtcctctggaagaggcatctctccagcctcttaatttcatttcttcagtagacacgttgctttcctgaaggcttgattttattttagcatgttaccttgatttaaaacctctagggatgacctcccgcctccgtgccatcctcctattctcctgacttttaaaagagaaagcacttgaaagctcttgagtctttttgaacacttgagttttttgagacagggtttctctgtgtaacaaccctggctgtcctggaattctgtctggagaccaggctagccttggactggcaaagattcacctgcctctgcctccccagttctgggattaaaggcgtgtgccaccaccaccacctggttcacttgaatcttgatattcatgggtggtggaagtgttcatccttgaaatgcaagcaggcttgctttctatgtaggcttctagttgtagatatgaaaggtatgtttgaagtttgattgccttgggtttgggaaatcactgggatgtttattctttgctgcaactgatgaatacattgcttagctttccctttagatacattctttctttgcatcctgtatgatttagatgtttcatagttagctatgttagtgagaattttttattagctgcagcaaattgttagttatttgtgtatgggggtcatttttttctttttttttttttttaaatttctgctgcatgatgtgtctgtctgtcgaggaagaactgcccaagcagtgataattcaaacagcctttgtatacatacatttaaatgctttgtttgggtagtcaccactttgtaatatgtcaagcaattgagttagttggttcaatgcctttgggctatcagttttcttattatataatacactctcagttatctgcttatcctagttagagagccattcctggtcattctatccaatccagaaaatgggatatagctgaggaacacaactttatggattaggagacatcacagagccaacaaggatggctgaggcagagcccatccttctcttacaatcagtctttgtcctttttcctttgctgagttatactttccttttgtagtgaccaagatgactcaggcctcagtgactcaaaggggattcagagcagctatacaagactgcagttctgttaagaagggcatagtctattatactgaggccctaaggagaagaagaactggagagggggagctaaaaatatttgtaactgagatacagcttgtcatttttatagaaaaatttgtatatgatttgctacctctgacaaaataatattatacttgcccgatgaaggcagcaaattgctagactattgcttcttgaaaagtggacatcattccacactattaacaaaatgttcattgttatcggaagtttcagatttcactaaatctttttttgtcattttttaaaaaattgagctattcatttttcccctcccctcccctcccctcctccctcccctcccctcccctccctccctcccctccctcccctcccctcccctcccctctcctcccctcctcctgctcctcaagctcccaatttactcaggagatcttgcctgttttcttttcctaggtggatacatgtatgtctgtctctcttagggtcctctttgttgcctaggttctctggggtggagatttcattaacatttaagagacacatcctgtttctgtgtgtggtaatcctaagtgccctcaacttgtgtgggaagtctgcattggtctgatcccctgtgttgctactaacaatttttaaactgaaaaattttatgtgtatcttattaacttttatctccttatgctaggctagggaggttattatttttgcttgctgtggtatattttggtgtctattttcttgctcatttgttaatgattatttttagcttggtcttctgcacttaaaatacttcttccttagagctttgtattgattgagtcagggctgggctgggtctatgatagtgattaatgatctcagatgatagtattgttaatatgttggtattgcattgaaagtactaactcagaaatagtaatcggcatttctttaacatgctgtcatatctgaaaagcgcccatttgactgttactattttagagtatcagttagggttcctcaggaaaaaaaaatgaatgagtgcacacacagtgtaaatgtattatttctattacgacttaaaggttttattttaagtcggctgagaaatggtcagtggttaacagcacttgctatgtaactgtgaggatcagagttctgatcccagcactcctgtaaccccagttcctgtgggacagagacagggttcgtggggcttgctggcttccagcctagccaaggaagtccaaacctaagttcaaggagagatcctgcctcagggaataggtggatggagagcagtagaggagggcaccgattcatctaattttagggagtgccaagctcaggctggaaatccagcagttgattctgtagtcttcttgtggttgacaagtccatttagggcacatggggatgtgtgctgcccttggagcttgaaaaatgtttgcaagtggggatagtccaagaggccttaagaacagggaccacaaggaccagcacaagtggttcagagttttctttctggaagaagttggtggtaaagaaacaggtgcaaatggaaccccaacttctgtaagcagagtaaggcagaagtttggaagccctctcccacagggttttaaggagactctgggggcattgtaggatctaaatgggtcttttagaaggttgccaggttttaggcattaattagagctgaatcttggtagtaaaattaatgctgtttgtcaatcagttgtagtccaggactgtgaagagaaattttttcacagtcctgtttgaattcttgtcctggcttacctcagtgatggactgtggtagagatatgtgagccagtaaaaaatcctctcattcccaagttggttttggtcagtgttttatcgaagcaagagaaaccaaactaaggcagtagaaatttctatcccactttgtctaacccgtgttagagtgcaggctggagcatatcttaaagtcctttctcctggaagtaatcatcgttttcttttttttcaaaaggttcttagatttttttgttgtgtaaccctaaagtataagggggtgtgtgttatttcatctgtgcacagccaggggcattgtagccacttgttttataccacgtgtttcacttcaaatttttgttagatgcagttagtttataatcgatcagtttttctaaggatgctgcttcaattaatgtagcatggagggtggctgaaagtggtgtacacttcggacatgttcgctctgtgcagagagtgaggtgccagttagcacagggcctgctcacataaaaattcattttccttggaatgtgaggctggaacacttctcatcttacagcatgctgcagggcagggctagaatccaaactctgattaaaatcacccagcctttttttttttttttccccctttgctttataaccacaagttattgccggttgaaaaggataatgtagggtaatagtgacttcatttccatctgctgcaaaaaattattttagacagttttatttcttttaaacctagatacaaaggccactttgaaatgaagagtgaattagtggctatcaagcaagtagctattagattcctgtcctagaagcctgtacatcctagatgctgatggctgttgctgacagttagcagtttgttctcaaataggcccctcaggtgtgtgtcgaaggatgtggagtgacagagaattcatgtattaagagtctgctctgtctagtcttaggttttaggcagaggtggttcgtttccagatgctgcttaggttttctcatgtttccgggtcaagtgctttgactttgctaatctgtaatgagcgtatgtaaaaccaccagaaacatacacaatttgtgttaattattttcttttcaatgtgagaattgagcccagggcttcacatgtattagaaaagtgtcctactactggactatagccctagccctaattggctaaattaacaattaaagggacggagagatggctgagagttaagagtatgtactattgctcttttagaggatccaggttcagttcccagcaccctcttggtagctcaccactgcctgtaactccagctccagacagtccaatgcccctttttttctggtttccttgtacacatagacttgtaaataaaaaaattaaatctttaaaaacattttaaagtccaaatgtaacacttaggattacttgcagtaaatattttatttagtcattggaacctcaaggaactaaggcattttgagttgcctatgtctaatatcttgtcaccctgtctttccccacctcccatgcaagttaggtatttgaggggaggattgaagtcctgtacttaccagatagtgactctttttggtttctttttgactgtcctattgttaatttgcccacattctttcctttttggttaggtttaacccagcatagtatagaaatatgttccctagtattgtaacctgattgttagtgatttgggctctggccttcacagaatagtagccatctaaaaaatgatttaatttctggttgttgctggcttccaggattttgtttgctgactgtgtaatgggtattagtattatctactccttttaggaagtgggcaactagaatataatttattaactattgtttaggtgctttggaatttcagatctgttttataaaagattttagtcttatttagaagactgctaacagttgttaattgtttagtgctcgctgatcactggttttgcatctgccatgtgtcatttcctcttcactacagtcccattaggagctattacaccagatttacagacacagaagctgaggtttatggaggctgaatagcttgtcctatctacacagtaattgttggagctggaattttaattcaagcaacctaaagtccaggatttagcttttaacaactctgctattaatcaaatggatactctgtctcatgcataatacagatctctcctatagtgcccccccatcccccaaccgtgccatttctgattagaatctgagtatttggacagactgtccatgtctattgtactcatcattcaccttcagagttactgcgtgccagttggtttcttagtattttcaccccaggctgagaggacctgtcttgttgatgactgcctgtactttcaaattggaggggtggtcttctcttccactaacaatagcagttacaggttttcccacagataatattgtacttggagggaagtttatttttgttttcagtgtacacctaggtggcagagttgtagaaacagccaatgaagaagaggaagaaaaaggttgatttaaaattgcccatgagagggctggagagatggctcagaggttaagagcactgactgctcttccagaggtcctgagttcaattcccagcaaccacatggtggctcacaaccatccgttatgagatctggtgccctcttctggtgtgcagatatacatggaagcagaatattgtatacataataaataaaatcttttaaaaaaattgcccatgagagtggaaaggtgatggtctgtatgtggactattgagttaaagcttttcatggttttgtctttagagtcaacctttctacactattactgggagatttgtgacctacagtacttttatcatactcctttaggttttagattgcaatgtttagctttataaaataacataatcttcagaggcctgtgagatggctcagtgggtaaaggtgctataggtacattctcataaccagagttcaatcccttgaacccacatccagatggaagaagagaactgaccatacacacacacacacacacacacacacacacacacacacacacaccccacacacacacatacacacacacacacacacacacacacaccacacacacacacacacacacaccacacacacacacacacacacacgagagatagagatagagagagagagagagagagagagagagagagggagagagagagggagagaaagagagaggagggggagacagagacagacacacaaacacacacacacacacacacacacacacacacgagatagagatagagatagagagagagagagagagagagagagagagggagagagagagggagagaaagagagaggagggggagacagagacagacacacaaacacacacacacacacacacacacactcgagacagagagagagagagagggaaagagagaggaggaggagatagacacacacacacagaacaatttaaaacaaaatgtttttcctacaagataaccatttcttgtctattttgtgattacatctttgttttgacaaattttaattaactgcagtgagttgtccgtcattaaggtgactaatcagggaagagggtttagccagctcagagaatagtgactgagtcttacatgcagtagtaatcttagattttgccatggaagggtcatttatgttacattgagcttaatcttttgaaaaacatggaaacaatttaagattgattttttttatgtgtataaatggttgcctgcatgtatgtgtgtgtacagtgtgtgtgcctggtacccataaaggctagaagctgacagtttacctgaaactggagctcagaggtttgtgggctgccccgtggtgctgagagcagaacggagactttgagagcagcagcaagtgttcttgattgccgagtcatctctctagctccaggtctaaacttctgaaagcatgtttttttggagcagtaataaacaggtactacacataagatgtttttgcttaggaacttttcaatcctgaatcaggagtatgcaggaagtcaaggaggcatacatgtaactgaattttgtgtaatgctttcgatagtaataattaaaacagtatgattcagaaacgtaaataatctttttacaacatacttcagtgttgtaaatgagagaaaggaaaagacatttatgcactgttgtgtgatgctatgctatgtcctaggtttagtgtgcttgcatgttaacataaacttgactattatccttgttataaaggtagaaaaccaaattttagatggcttccatctagttgtgtgatcccagcactgaggaggtagactcaaagaggatcagggtcagcacctgggttatgtggggcagagtctcaaaagacaaaacaaacctcagcaaaatgtaggtagatggcagtggttagagtaatataagtaaaactgcaatttcagtacaggactgcatggctccagtgctgaagtcatccttcctctcccctccctttacctcctctccctcccctcccccctcccctcccctccccctcccctccctcccctccctccctcccctctcccctcccctccctcccctccccccccccctctcccctcccctccctccctcctctccctcccctcccctcccccctctcccctcccctccctcccatcgcctcccctcccctcctctcctcccctctcctcccctcccctcccctcccctcccctctttttcttctgttttattctccttcagctctactagaagtttttgttcccttcctctgccaatcccctttcttcttcaccctagagatgtcaatgtccataaactctagctgtaactactgtatttctcatattagttcagtctccaatgccaggaagggggggtcatgggaattgggaggctgaagaggatgtgaggtgtcttagccagatgagacacattttattcattttgagtgaaggctgccacatagactgctaggcaggggatgctggcggcacccaggcacgtgctagcacatgggcgacgcataggtgagcgtaggtatgcaggcagaccggcacacaggctacacagaggtaggtatgcagaccggccttacaggcagacacacacaggcatgctggcaaagatgaaagcacttggttctgagctcaaggccatatttacccagaatcacataaaagtagccttctgccaggaatagttatataacagatcacattactgtttgcttttgggttttccagatattggtgttagccacacccccccccccccccattattatcaccaccaggactgtgcagattccaccaggacacgtcgcttcagaactaatttactgctctgtgtttgtttattctgttctttctgaggcagtctctttatgtaccccaagctgtcctgagacttactttgtagcccacagaggtctcaagctggcaccaagacccccgcctctgcctcttcttcagctatggtggagataaaggctcagcatcacactgtgtagtcagaagcttgaaggtcccatttgtgttttagggacctcagttcaggtaatgaggttagctccagagttagttcccctttccagggacttgggtggttctcttagaggcagaattgtggcttaggatgttggtgtatctatcagtccttagagtgatgtccttctggacaagccatgtacagaaacagctgacacacataaaaacattatgtggatctttggtcagaaaatagtcacagtgtgatggtttgaaagaaaatggccctcaaagggagtggcagtattaggaggtgtggctttgttggagtaggtgtggccttgttagaggaagtgtgtcactgtggcgttggactttgaggtctcttttgctgaaactgtgctcagtgtggtgcacagtttacttactgttgcctgcgaatcaagatatagaactctcagctcctccagcaccatgtctgcctgcatgctgcaatgttccactatgacgataatagactaaacctctgaagctataagtgagcctcaattaagtattttcctttataagagttgccatggtaatgatgtctcctcacagcaatagaaatcacaaataagacacaaagaaaccaagatagcatggaagccaggagagcagaacaggtaggtgtcagtcaggcgctcaccacagtgtttcctggaaagctctcagatgtcagcagctgtaggaacagcgtacctcctcacactcacctttgcatctcaagtcccctagttttctagggacctcaactcaggtaaaatggtatctgtggcttctatgaagaaaagtttaggatgagccaggatgaagcagagttgggttcattgaaagcaggagggcccttaggggaagagaaaagcacacctgagagcatgagtggtttcttcaagaagagctgccctccggtgtcctgtggtgatggtatattttgtatatttgtatattttggaggcttttataatgtcgttatttagtggtttctcgggactctcctctccttttcctctctcttttcaatggttgagagtatagagaggctgtggaggttcctttgatgggactccaatcagacaagcaaaccaacgatgcacaggggtctatgatatggatttgactgtaatggggtttctgatgaaattgctggaaaatcagagctgaatagctggggtaaaaagccttcagcaaatgttgttagttgttttaaattcttgattctcagctgtcaagaagcttcaatacacatggaagtgaggttcctttcccttcctacatctgcataattttgtccttcaattctgcctcatgctcagttctgggatataggcatttatcattagatttctgctttctcatgatctctgaccttggaacacttcttgtagtttatttctgacttcaccataccttttttttccttttggtttttcgagacagggtttccctgtatagccctgcctgtcatggaactcgctctatagaccaggctggcccggtactcacagagatcctcctgcctctgcctcccaagtgctgggattaaagctgtgcactaccactgcccggcctgactctaccatacattaaaaaaataatttcactcatttaaaatatttttttacttgaaggttgataaggtgttttcatcctttccactcccacgattctctctcattccctttttcctacccctggtgaaccccttcttcctagcaagtgctgtctcccttttcttgtcttttgtttagttcttttgtgacccactgagtttaatggggctgcttgcatgagggatagtgaggaaatacttactggagcatgggctattttccagtggctacaccactaaagagaaagacttcccctctgtaagatgctgttaactgccagtggctcttcaggtaaggacagggcctcagaacttcctccctacactatgattggacgttgacagggaggtgtcaagcaggtaactgaccacagttgctgtgagttcataagggcaacatccatgctctgtctggaaacagtgttttatagcactgctcttcatgtttctgttctcacagcctttctgcttcctccagagccttggagggagtgagagatgccccattgaatactgagcactcaaaagacacttattctcagcacttaggccagttactagtctctccactaatcattgtccactgcaaatgaaatttctctcactaaggctgagatcagcattaacctgtggttataaccacaaatcttagaaagtagttttataccatgtccatttatgaaaataatagtaggttccccacaagggccgatgccctcgacagccatgggcttttgatcagatttactgtgctaggcctgatttgatttactatggactgggcgtcatgtccaagtagaacagtggttggttatcccataatagtcatgccactagtgcattagtgccatctagttttggtgggtgaccaaagcaatggtaatagcctgtatatttaggtggcctccgagcctctctggtcaataatttacagagaggtaggcatcccatactcagcactgcaacccaacatgctttaggtgatctctagacatatattcaccagccagaagcaaggccaccttgtcacctgcttacttggagtattttgtgttgagccaaggtagtggggtggtagtgtgtgagaggacttttggttttagtctggcattctagtgactgtcaaacctttttcattgagagacataaaaaataaacatgttggaagaagtggctccaaaagatttcccaaacaacctttgaaaatgtcccttgttggaacctttactgacttctttatcaaggaaggagaacagcagtctatggacagacctttttaatgggaaggaagtgttgtttcttgtaccttttactctgaggtgaacaggcttcatgacttgctttgtgcctgagatcctgtgttgtgaagctcaggtggagcaaatgctcagagaacatttatgacattaaggctgggattactgtgaacatgtcaaaactcatttgtattggaattttgcagagtttgctctaaggatttagcttcttaatgaagcatttaaaagatgatgaccttacttcatgaattttctgtaaatgggatttttaatgtgtttctggaggcatctttggctcagatatagttttcctatttaacaaaaaatgtataagaggtttttattgaaaaaattattaccaaaaataatgcctaggatgcaagcagcactatactgactgcttgacccattgctcctttgcagtgtacccaatatactaatcttccttaaaaaaagaaggaagaaaatagtacctgtattcattttcttcttaaccccatttagcagtaaattcaggaggacatcctggagtagaaaataatgttgttacctatgtgagatgttttgctttgcttactgacactggaaaaatacatttcctagcaggtggtattagtgtgatgtttttgggccatgcttctcagttagttctgatagacgagatgagcatttctggggacagtggcttgctgtaggtggtgatgctgagtgagaactggagcacatccatttcacacccagtataaactcccacgccatttccaactttttcttgagtggaccatgtcatttactgtatcttcaggtcttgcaaaccacatagcttatccatgaaatcaagccatggtttcaaagacccctttgtaagtggacttaatttttatttctttaggtcactgcaatgaaaaagacattatgtagtgtgtgagtgggtataaaaacctcccccacttccttcttattctaaagactgctgtagtatagtctggctggtcttccttacatagtccctggcatcaacagttaaccatttaactgaagctaataggcttttaaattgtatttataaggtcacatgctgtctttcagaggcgataacatttgtgagatgtactctctgagttttattgctttaggcttggattggctggtcattcagggtttgtggtggagaatatctgaaatggcacatggacttgggtgcctagagtgctgtcagcatgtttgttgcaggagtccttcctttctttgcagaagatgtttctgttagagttcggacccttgtgctgatgtggttgctttctccactgagagtttagctttacaaaatgccactctagcctaagtatcatacagtttgtcaattgtgtgtatatgaaatgtaaaatatggggagattatttcagaggtgggatggaacaggggtttttgtatctgacaatcccacacatatcacatagagtgaggaatgatctctgcaaagatgagtcagattttgtttgttattgctgttgatttcctaatcagaagaaagcttaggaaaaaagcatgttggctagcagaagagtagctcaatagtggcagtaccttcagttcctctagcagtgtctactgaaagcctgttgtggaatgtcaatgttttattggttctgatggaagagatagtaccccaaactagaaatattggagcagttttatgaagtaatgggatgaagacactgaggtgtgtgtcgggtgtgatttgaagagggagcctggacaaggtgagggattgtagaatgttttgagtcaccagtttggctgaagtatgtggggcgataattggaaggctcctataagatggaaccaggacacacaggacagtgagtatgctaatgattgtgaagtagtgaagtcatctttcatgcatttgacagcaaagtgcatattgattgtatgccagttgccaactaggcagaatagtacatcaggcaagatcataactcccagggggcctaaactggtaagtcttaatttactgcttgatggcataatgacttcgtaactttgaaatttaatgcttgttgataggtctgaacttgtctgtgatgataaaattaccaagtcattgagttttatcaactattctaatgttgacgatctaagaagctattataagaaccttcagtttggccaactgatcataagatatagaaagcttttatcatcactaacaaatacttttgtctcataacctgttttaactgaaggcctttgggtttggtttaacagtggagtgagaagctgcaggctcagttttcagcaccaaaaataaataaataaatcaataaatcaatcaataaataaatagtaagcttttcagttgagatttttaaaaatgaagaatatttttaagctagttttggtttcttgtggataccgcctattttgattttaagttaaatataagggaatataatttagatgaaatattttcaattttcaattttcaattgagccatgttaaatttaaaatccaaaagtgcccccatagaaatcattgtctgaatacttgtacccatctgtgggactaaggatgtggaagcattggcagtttggggtttttaatccttatgaggacagtggagggaggagtgatttctgcagacaaagtagatgcttatttgtcgttcctgtagatctcagaccagaggcagaagtagtttagtctgtctttcctcctcttcctcctcctccttcctcttcctcttccttttttttttttttttttgagcttggtttctctgtgtagctttgtagaccaagttggccttgaactcacagagattttccttcctctgcctcctgagtgatgagattaaaggcgtgcaccaccaccacgtggccagaagtagttttcacagcatcttacagacttgcagtgggatatgtccctagaagtctttgaggagtagatgtgtccctgtcacctctccaccccgtggtgctggggatctaactcaggacctcatgaatgcaaagcaaagactcttccatgtgttgatgcattgtttatgatctaataaagctactggagatcagtttgcaaggctgaccacactagttagctatagaaactggacagtggtgacagataccttcagttccaggactcagaagacaaaggtagatggatctctgagtctaaaaccaccctggcctactggagagtgaatcagagctcatggctttaatcccaggatttgagaggtataaaaggcagagccattcagctcaggattctccagccacgttgaggagaacatagcagtctgggattacagtctgaggtttggtggagccaggattgcctttcagtctgaggtagagtaagagctagtgatggatgctttgcttttctgatcgtcagcttgaagcttgaaccccaatatctgtttctgggtcttttatttatcttgctacacttccaactaagctctgtccccagtctgagaagagacttagaatgaagaggtcacaagtatgatctcacagaggctgatattgtggtaaaagtggggtgtgagtatttgagatgctctcaccttttaatcagggatatttgtatatgtctgctgtttggactgctggcatttagtctttgcatatcccataatcactctctagtaccctgtttaaagattactatactcctagcacttgggagacagatgtaggtggatctccgttaagttcaaagccatcatgctcttcagagctagtttcaggacagctaggactacacagtgaaaccctgtcttgaaacacccccaccaaaaaaaaaaaaaaaatcactgtactcattcgctctctcatactgttgaacagtgtagttaagattgttgcagggtggagtatgtgaggattgggcttgtcctgagaagtgagtatgaaaagcttggttctgttgcccagcctttgttaggatttgtccttagttgctgtccactttcctcatacaaccatggctttgtcatgactgtgaaactgtggtatgatagatggatgatgaggcatttatttcagagggtatgaattgatctgtgaattcacttgatggaaaccagactcatttttttggatgtagttggtctagagctgggcttaaactttggctttttcttatttgtgccccctccctactgcaggatacaatatttcttaatctgcttcctcattagtcaatggagactactcacttttgttgtaggttgctgtagtgagatgcttggaaagcactgtataaaattccaagggttattaaacgtcatgtattggtaaactgattggaatcattggaacatgttgtcatttaggtactattgtgtttcagatttcagagttttttgaattttgaaatatttgcatgggtttttaccagctgagcatctcagatccaaaaatccaaaccccgtgtctttttgtgtatcttacctgtgtctacaaggctatcacagatcaggagattggaagttctatggggatgggatcttgtcagtcttgtatccagtgtctatgtagatcatgcttatttcatttctaagtttaaaaactttttatagtttttttcctattcccatttattttattttattatagaagcacttatattttatgtatcaatcctcccattcccctgccctcccaccacccctccaacctatcccctacccactccccaaggatagtgaggtcctcccatgggggaatcatcaaagtctgtcacatcatttgggagggcctatgtcctctttcatgtatctgggctgcaatagtatctctccatagggaatgggcccccaatgtccatttctgcactagctggctccactgttagaggtcccatagacttcgcaggcctcctagctggcacccacattcagagggcttcgttcaatccaacgctggttccccaacttaaccactagggtctctgtgctctcactaggtcgggtcaactgtttctgcaggtttctccaacacagtcttggctcctttgctcatctccctctccacaactggattccaggagtatggctcaatgtttagctgtgggtacctgcttctgcttcgatcagctactggatgacagctcctgtttgtctttctgtgattgggttaactcattcaggatgttttcttccagttccatccatttgcctgcaaacttcatgatttcattgtttttttcctcactgagtaatactccattgtgtaactgtaccacattttctccatctgttctttggttgaggggcatctaggttgcttccaggttctggctattaaaaacaatactgctatgaacatagttgaatatatgtccttgttgtatgaatgtgcgttctttgggtatatacccaagagaggaatttctggatcttgaggtagactgattcccattttcctgagaaactgccatacaaagtggtcatacaagtttgcattcccaccaacaatggaggcatgctcctctttctccacatcctctccagcatagactgtcgttggtgtttttgactttagccattctggcacgtgtaggatggtatctcagagttgttttgagttgcattttcctgatagctaaggatgttgagcactttctgaagtatctttcagccattttagattcctctattgagaattctctatttaattctgcaccccactttttaattggattgtttggtgttttgatggttagcttgttgagttcattgaacaatactcaactttatatggaaaaacaaaaaacccaggatagccaaaacaaccctgtacaataaagcaacttagaggcatcaccatccctgacttcaagctctattatagagccatagtcctgaaaacagcttggtattggcacaaaaatagacaggtagaccgatggaatctgattgaaaacccctgatattaacccacatgactacgaacacctgatttttgacaaagaagctaaagttatacaatgaaaaaaagaaagcatcttcaacaaatggtgctggcatatctggctgttgacatgtagaagattgcaaatagatccatatctatcaccatgcacaaaacttaagtccaaatggatcaaagacctcaacatatttccagccacactggacctcttagaagagaaagtgggaggtacccttgaacaaattggtacaggagactgcttcctgaacattacaccagtggcacagacattgagattgacaatgaataaatgggacctcctgaaactgagaagcttctgtaaggcaaaggacacagtcaacaagacaaaacagcagcccacagaatgggcaaagatcttcaccaaccccacatctgacagagggctgatttcccatttatttttcttagggatttatttacccctgcaccatctctgaaaatatgggactggcagagtgtagtaccttgccctgtagctagacagagaaactagctctttggggtctggtctctggaagcaaaggagggacagataaacaatgggttccacccacaatagctttgaatttggtctgacataaaaccgtaaatttaaaatattatgagattttttgtcttataactcaattatactcttctccagtgtgcacattgtagatgacattggtgggttgcaatgtcaaaggttgtatcttctatacaaagtggtgtacctcaggtcttactactgagaaattctgtcctgctaggcagtgcacatgaagcccatgtatggaagaaatccagaccacaggcttttgaaatggtagttgtttatgaatgtaagtcagtgtttttacagggacatgtgacaggtaagcctttatggtttttgatgatactttcataattctttttagtaaattaaatataaccttctacctagtttctctgaaagaatgatttgaccttgtacatgagcaactgtataaagggcaggttgctcaactacggattttttttcagttgcaaagtagattatattatttactttgcagaactgtttttaggagggaaaaatacatacaatatatgtgatacaacactattatttttgctttaggctcattgtataactattttatactgtctgacagtaagttcctctggtatgatcagagcattccagatgtcagttgtgggtttcagtaattgtttataaactaaatttaagttgtacttttctttcgtagatttctgagaatgaaggcccatcttggttgttgaattatcatagtcattcatgtatcagctgtcacaagtacatcattgaaaaagaggtaatttcagattttaaagtagctgtttatcttttaattttatttgggttatatttatgtccttaacatagatgttaatagtccttttgaactaaatttgacccatccacattataaaacatagctattatattcactccttgtgtgcatgtgtatgtgtgtctgcaaatgcacatgtgtgtgggtatatgtacatgtatgtgtgcagtgtgtgcaaaggccagatgacaacctccagtgttgtttctcagcatggcctactttttcctttgagatgagatctgtcctgtcctggaactctctcagctgggtaggtggctagctagcgagccccagtgtccctggtctgcctcccgtgctctgggattaccagaatatgccatttcatctggcttttaaagtctgggttctggggatcaaacttcagtcgttgtgtttgcaaggttagcactttgctgacagagctattaactagccctacacactcattctttactggagatttttgttttgtttctattattcaaaaaccttttggtaatatagtttatactgtgatcaccactgtgctgtgtgatatagatcacagtgaactaaaactttaaaagtgtgctataggatatttaagtttcctcagatgaccttaaatgttcattttgtatcacttatggcaaggatagagtttgagaaatgtatcagtagttcactttgtggcatgactactacagaatgtgtgtaaacacacctacatggtgtgacatacgtgcaactaggtgtatggtgtttgtttttgtttatttgagacagggtttctctgtgtagccctggctgtcccggaactaactcactctttaggccaggctggccttgaactcagagatctgcctgcctctgcctcccaagtactgggatcaaagttgtgcaccaccatcacccagctcagatctccgttttgtacttagtatagtgatatcaactgtagcctgtagtaggctaccaatgattagactcttggtgtaaaaagaatgaagagttctattttggtttagatttggtactaggatcatttggtaagccggatgataaaaaacgaggagaaaaaagttaggattaaattattttatttcactaggtgtggttacatgatacctatgatctcagcacgtgcaagggtgaggcaagtgagagcactagattttagaagtgttcctcctgagaaaatgttgtggttgtgaaggtctcttcctttagctccataaacttgtttcagagataacagatctgcagtctcagtgagcacacagaagtggcagtatgtgtatagggtccactggaactaatgttctgttagcattttgtattaatccctcatcacttgctgtgataagatgtcacgagcactcaacttatgtaagagtttattctgtagggacaagaatccattatggcgaggaagcatggcagcagattgccatggcggttggagcggcaggagcctgagtgtagcaagctttcttgtgggactgtctctggatagccagcccctgaataacgacatggagactttttattaattatgaaagctttcctttagcttaggcttgtccccaactagctcatataatccaaattaacctgcttctcttaaatctatgttctgtcatgtggcttttaccttccctcagtacagcatgtccgacttgctccaagtctgctggtgaaatcccttaccctagattccttccactcacttcttctctatgccaagaagtcccgtctattctctccagtcaagctactggccattcagctccttattaaagcaaccatggtgacacatcgtcacacagtgtaaacaaatattccacaacacctgagaactcacatcctcaaccacaagcatgaagcagagagaactggaaatagggtgaggctatcgaatcacaaagcccatcagtgacttacttcgtctagcaaggccgtattgcctaaacctccccaaatagcaccactaattggggcctaagtgttcaaatacccaaacctatggaggacattttgcattcaaaccatgacacatttggaagaaaaaataattaccattgtgtccatgtaacttctgggaatgactgtacttgtgtcaagatgaactttcattagtaggagagattctggaaggatcactggagaactaggggcccagggtttcttatatttttttttctttagtaactgactgggagcttgtgtaactcagtctttgggattttatttccccatggaacgagagagagtggaataccaagagtctctttcacccagaggaagaaagttcggtcattaccagtactgagctatgctagtctgcagggtcaggaccagtccatttgtgccacatttggcagcatagagtaagtatatcacaggtgtgtggctacctctctctgcccattcctattgtcctttggcgtaagatccagagatagaaatggagtggtgtcctggttggctgtgtgtcctcaggcagatggctagttctacttattacatagaatgcagcagctgttgtgttccagtagttggtgggttagttatcagtcatagataaggtaatttcagtgattaaattatctgtctattgctttatccaaattgactttgtggaaagagagtaatgagacacatctttagccagttctcaggaaaaaacggcattctatgtaataagtagaagtttaacattgtttttaaaggagaaatatgaggcaatatgagattatttcttttgtcattggattttaaaagtgctcatcatcaccatgtctgtcttagtgcttttgattggctgcttacagtgtattagaagtgactagagtgttacatgagtgactcctcattagcctagcagccttgtgaggcaagtggcattatccccaccttagagataaggaaaacgaaacctggcagttgagcagcctgtccatgcttgctaagaggctttcactttcaggtcaatgctggcctcacttctagagtttgcttcttggctctccttttatggaccatatatttatgtagccattgtgtgtgagcttctgtgtgatgagttgggcatgggctgctgtcctcaggaagcccatggaggaggttttgtgccctgcagtttgctggcagtgtccctgcttcccactaaggaaccagcttgcgccacactgtaacagccccgctacggtttctaacctaccatttatttggtgtttatggtatgccagcctctgtgctaacattatttaagttaagccttaaaacaacctgtgttttggtgactctggtattcctcattttctggatatggcagctgaatctgagagagtaaggtcattgccctctagtgagtaaactcagggaagatagctgagatttgaaccccactgttgtagttctctatccacaccccagacacacccatatgccctggagcattggaaatgcagtcactataaagatttcagatgcttggatcaagccaatttgaaaataaactgttgtaaatggttttctgtggatgcacggatcaagattcacggggctagtctcaaaataggttaatgtaactttatttggggagaaggcacaagaaagtgggtcactaccacaagttccagctccaaggattcacccaggctgccctctgtgacctgagcagaagcaagagagagcctcctgtcccgaccccagacctaaaacccactctctgtcatgtctgtacctgtgaccatgcccaaaagggtgtggtcagagatacaggtgaatatctcactacatttttttcagctacagaagtagtatttgcctaaaaattgggagagctgttagactactaacacaccaaaaaagctatgtttggcatgttttccatttcttccttgaaatgattattccatgttgtagatagattatacttgagaataggagcaaaatttaaagaatcctcaattaaatttgtaaagactggttagataacttatttttggcccccgataggaagataaattgcaagttagattacgtatggggagagtgacttcataatgatgtagtaataattgtggcatttggatctcataggtgaacatagctagggaaaaatgtctccaaaaatacctcagagaggtatgagaaggagagataagggtctactatggatcatcctagtgcactttctagtgccaggaccatctgttaagatgccttttcgttctatgaattgtgcatttgtgtattctggatggtaacatttttttgaaaatgtgaattattttactgaatgagagtcttgcagtgatatagctcttattatctctatgttaactgtaattagagttttaacaacaaaatcatctctcataaaatatacataatatactcgttacatataaaaattcctgggttttcttgcatctttattgaccagtagaatttattgcttagttttctagttttatgcttccagaaaaattgcatggaaaatcttcccttatgctccctaccccctgcctccccaattttctctatttttcaacttttttccaaataacaaattaataattgacatgctattattaactagagtgcatagtctaggatttatattaagatttgtatagtcatataggtgctgaaaaagtcacaatttttaaaatctcttgtgagcttttaaaaggaaaataacttctcctctgtcagcatccctagtccagctcttccaagaaacagtggagttgtcttcttgtctccttagaatcatctagcatttcatctgtttagtgaaaacagtgagggtaaatgttccctgtaaacagatggtttttgtatgcatcatatttgccatttaaagcatagtaagtcaccttgaaacaatttcttctcctccttctccttctttttttgagacagggtttctctgtgtagctttggagcctatcctggcactcgctcttgtagaccaggctggcttcgaactcacagagatccgcctatgtctgcctcccgagggctgggattaaaggcgtgcgccaccaatgactggctcaccttgaaacttcttaacgggagggattattagggaactgaggacagctttctgtgtattttctgttgaacagtcctctgggaataataatgctgtaaactagcatatccagtgctgaaccatagccacacctggggatgggcactggtgctaaaacacatagtgtaagccttgggagcatgctgttttctagagctgggaggaagtgctctgacatgtgttgtgctcatcccatcaccacctttgtaccgacagaaaagctctgacctggtgtcacacaagacttaagagttcagtttctgtgatgttttaaaccaaccgaaaagctttgacctggtgtcacacaagacttaagagttcagtttctgtgatgttttaaacctctgagcagcttattgattatatgattaaatgtgtctcaataacatgtatgctttcccgtagaaaagtggaaattgaaaagagaaacatgaactggtcaaggaagctgtaaggctctttcatgaaaaatcagcaattgttttattgctttctcataaaactgtgagtgtttgcattggaagatattggtggaggcttcttcataatggagtattatatattcattttagaaatagaagcttcattcagtggtttggtagactgttgtgcttgaatgcagaagaaatagtgacaactcaaatagataagctttaaaaaatcattttctattaatttcattgtatgaaagacaacatgcttttctagaagctatatggtgaacctgttttctaaactttttgtactgtgagcttttgacaaattgtctaaaaattaatttgtaactatatgcatgacaacattatagttctttgttatgtgaaaggaagtgcctgtgattggtagctggaaaaacaaatatgtatttacacacactagaacatcattagctttaaggtggaagaaatccagacaatactgcagcataaatgaaggttgagaacattatgctaagtgaaatagtagtcttaaaaattcagatactgtatgcatctactgtctgatctaaactcacagagacagacaggtggttgtcagggttagggaggaagatgatggattgatggagagaggtttaatgggtttagagtttcagtcttgcaagataaaatctagagcttgcttgtaccagagtgtggatgcgctccacatggctaagcttaaaaagggttaagatgatatattttatgtatagtttaccataaaagaaattcaaaaaaatcaatgcaaagacaaacagatgcaactgatttccccccaggggattagccatggaggaatggggaaggctggaagtctaagtcttttcctagggatggattatctcatttcttaaataattaaatttaagaatatccagctgtttagagctaaagaggaagacagtcatttggataattactgtctccttttaaaatagatgtaaaactttgtattcttgtataagattttttaaatcctgttttgtcatttatttatactgactgaagtttttttttttttttgttaaatcatctaatatagagagtataggcagactgaactagccaagttcaaaggaagttatatgtgtggtggtgtggaggtgatggtacccactcgggtgtgtggtggtgtggaggtgatggtacccactcgggtgtgtggtggtgtggaggtgatggtacccactcgggtgtgtggtggtgtggaggtgatggtacccactcgggtgtgtggtggtgtggcggtggtatctacacagtggtagtttgaagaggtctgagctgctgtaggttttcctaagaggaaagaggcaaattgttgaagaggatgtctgtgtttttcttggagtgaagaagttacttggtaaacagaaggcagtattagttgaagtttagtaaaccaaaggaagtactatttgtgctaggttataatttccaacattcattaattatgaactggacttgggacaagattgaaggaaaatgtaatgattaaaaacagtattggatagtggcagagtttttgtatatatttgtattttccaaaaggcattccatggtaacatagaataacacatttgctttaaaggactttcagttggtatctaataatagcatgataaacctcattgattctgactaataaatctgtgtaaatctaaggtgtcaaaacaaaatggtcatctaaagaaatacagttttattagtgtacatgctgtatctgaaaatcagactaacataacagacccacgtggaagagtctgggggagattccatgaagagagacagcagtggcttgtgattagttcactttgcaagtgcagagtaacttttgaaatgacagagactacttaagcagatctctaaagttttagttttcattttctttatagcatagtcggtcttcagcctcacccctcaactgtggcttgaatttagagccgcctgtgtgctaggcaggcgctctactcgaccctaaccgaagccttacccccttttcaccttcactcttgaaacatttgagatttgttgctcaggttaggcttgagtttgttgtgtagctcacaaagcccttaaactctgtcctcctgcctcagatttctatgtagctagggttacatgcctgtgtcccctggcatggcaattgtaaatttttaatatggcatatcttgtaaattcttagttatctgtgccctgagactagaatgaaacatggaagtaaggcctgatgggagagcctctatatgaagaagggcagaaatcaaacaaaagccaaccaccttttgagcagcaaaagtgttagagtagcaagcaagaactgaagactatctcaacaaaaataattgattagtaattgaaaagcaaaatgaaaaacacctacactttggattctgggcaagtccatattgaaggccccaaagggcaaaatcaaaatggccatcacaggacaacaaagagaaaaatgaaagatcagaagcagagagatggtgttgacaatgatggttgccccacccagcatggatgtgagggtggctgggagagaaagctgctacagttaacatggagaggaaaagcatagcaagatgagacagagagctatctatggtcacccccatagctctgctctactacttcctgccgagatgtggtatggcactgggaaggagcccgaacagtccctaaagtgccaccttcctagatgtcatgtgaacctgtagagatgccctaaatagcttattctcctttgcaatttttttgtttcctttttggtttgttgagacagggcttctctgtgtaacagtcctggctgtcctggaacttcctctgtagtccaggctggcctcaaactcacagagatccacctgcctctgcctgctgagaaattttaaaataactattattttgtttcctaaaatcccatcatagttcttttggattttgaataatcatagtgaattggtattcattctcctacccctaatggtactttctgtttcattttgggataagaaggaacacttagggctcatctcacatcaccatttttatagggattctgaaatcaaggtgatttgtgcaaagaatgaaagaggtggcttgggaagtgggagtttggattcttataggagaaatgtaactggttgagcaggcgttttgaattaaactttcttatgcttgattgcacactgaagtattaaatctttcaagtgtatctgtatcagggctggttaatctgcctttaggtatataatggacagttgatctagctttgcttttaagaaaatccttggtgcacttgaccattaaaacacattccagcatttggtgttcattagtgttgtaactgaaacaaaaacattttaatagttgatcccagagtattttgaagttagtataactttactgagaaggtatttaagctttagtatcagttacaaataggccatgagccaacttttcaagctgtttctaagtaagacattgaattttttgaataaaaaaaaatacattgtatggcagtgtgccatgtggaggaaacagaatggagcaagtattgcaggatttgtaccgataattgtcattcctggtgaggcctttaagacactgaagtgggtttagagtgactcctcgtgtcaacagtttgctaaaatttggttttcgatcacgaaggacagactttgcacatgaaaataggcctggatttggacaataattaaagtttcaactcagtttaggggtttgctacttgtctaaaactgagctgtttcagctgaaattttaggaagatgactcatttatctgtcaaggtaggttaatttcacaatctagtaaattataaggtaaaatccccagtttaatcctagcatttgctaggcagagtcaaacagatctctgtgagttcaaggccagcctggtctacaaagagagttccaagtcagacagtgtatgtaataagaccctgtaacaaaccaaccattcaaccaccacacaacaacaagagagagacgactggcttggcagagaagggcttagaataagagactattttagagaacattcaaagacttccctttgccatgagaaggctccaaaaagttctgacattcctcccactggaagcttagaacctgcttttaaaacagttatagaatgctgatagttcatgtttttatacatatatcagttacattagaaaatgcattcaagattagctacttgagattataggtattctgggttataaactctctgaaggcagagtccttcatttgtttattttatatgtagtgcaccagccactgatcacgggctataatacatctgctctgggcagctcacagtctggttgggaaaacaggcgtagaaacagataagcacaactaaaactcccagtgcacatatagttactgcttgtcttccactactgtggaacagtgaggtcagaaggcacagattcatgtgctcactgagccttgttcctaaacacagggataaggaatatatttaagtggtatttttaagttcccatgaattatctcaaagtgtttgtttgtcccctccatgcaccccaatcctctataccaaccacagagacaaagtgtgtttgtctgtcccctccatgcaccccaatcctctatctcaactgcagagacaaagtgtgtttgtctgtcccctccatgcacccccaatcctgtataccaaccacagagacaaaacctgttgtacttttggattgtcccctccctcacccccttatatcttctgtatttaaagatgttggattctgtagagctcacatataatcacagatggttatgtgcatccagcatggtggcagtgacggcacttggttctagcattgttttctccaagtgtgtcttgtgttctgtcactaaagttcttttagattttatgactaaatcagagtatttgagttcatctgttttgtgtttgtttaacacctgtgacaagataatttcaaccattcactcacaaaagagaaaaacagtatcagggcatgtctcagcgttgaaatacaccttctatgtttttgcccattagccatgtggaaaataccaattacagaacctttgagaacagttacttgtaaacccagtattcatacaaaacaaaaaagcccttttaaaggaaaaccataatgagacacacttgaccaaatctgtgtcataaatctttcaaaatcagtgcagttgaagaatgtatccatgactttggagcagcttgaacaaaacagtattgttaagatgactaaagcaaggcagctggcagcctggttgtgacagaaaggtgtggcactccaagtgggagtggagcgttccccaacagcggggactgctagaggccatatatattcctgtgtgcagctcttaacagtctaatacacttggggtagtttgacaagtggaattatagaattaaaaaataacctgttgaaagtaccatttcatgtggaaagagaatcatgacagttagttgtgaatgtaatttagagtctggcagtgtctaccaagaagggcttgtagtctagtgtcacctttgttagaaaattgccctcgaaggcatgctttcagggtgtcacaggggcagattgtgcagcaagcattactgacaaagatcaagagactggctttgttaactctgtcacaggactcttaccacatcagccttagtctcttgagctgtgaagcacagaaaacaggtcccgaaaggtttctttgagacaagagctaatacaagagaaagccaaccatgtcaccagcatgagaagcttgcctaacccctgcacaagcagacattttctcccatgcttgctccccatcttgtttctcttccccttgagatctgtagattccattagctctcatactattcttcattgaccttactttagcctcttcaccctctgggtcttttgtttgtttttatgctttttttttttttgtaagtcatgggggtgggggtttataggtgtctgtgagcttcctgacctgggtgctgggaactgaacttgggtcttttataagagcagcagtgctctctgaactgctaagccatctctccagccacccacgctttgttctactttacctgacgtctgttatcttcttaaacaccccatctccaatccctgttcctttgttggattcccttactgagaaagctcggtgccactctttttacaccatggacttgtagctctccattggaaactcttaacccgagatctttgagtagccttggaggacctgcagatctctgaaacttcgtatgtgtttttacacaagagaggattctgacccctaatggtgctcagagcatttcatgaactctttaaggtcaggaactgttgcttcctgggatataattgccctttgctccccgatgattttagcctcctttctacttgccttgttggtgtgagggaccctctttatcagtgctgtcaccttcactcagagtgtgtgtgtgtcacttcactgtattataaggagctttgcccccacagcctgattgttgtgcttctcttttctgcagcagccttgctgtcatttttcacacattcagagctatggcagtatgtattccttaaaagttatttttcttggtttcaaattgtgatgcttttaatgagaatgtcacccataggctctggcatttggaaatttgggtcctagttggtggcagtatttggagactttaggaagtgtggccttgttgggggaaatatgtccctggaggtgagctttgagagtttaaggactttgtttcgagttcactctttgctttgtgtttgtggttcaagatgtgagctctgagtttcctgctcctacctccatgctttcatttcactctcccagactctcacccttgggacgataaacacataaacacttttcttaataagttgccttggtcatggtgttttatcacagtgatagacaagttacaaatatacaaatattcctagtaaatggccagctcaatatgaaacgtggcaggttgtttttagtttgattttccttttcttatatgtgaaatgtttgtgccagcttggaaccaaagtattcagtattttagaagataatcgtctagtgaaaaaggaatgttttgaagttagttataaattcaccagaagaaaaatgcacattgacagcattttggatttctttagcctttgaagacagatatggcagctataacaaaatagtcatgtagacttatggtattatttctagttggccagagaaccacagttgttttctgaagcagaatcgtcatgcacatgaatcattgtgtcagctggaagactttagaattcctctaggaagatgagataatcaagcgaggcattttcatgcatcttagcgtccgtgaaagcctgaggaaagaagccttcctccaaaagccatgctgctttcatctctgcactggtaccctgacctcagaatgcacgtgttttcagtgtccttccctgtgcttgtaatagtcagatcagatggacagacacaaatgccatatttcctccctttcctgaccctcagtgatcagctctgggttagggaccaaacaacatgcactaaattatttaacagaaatgagtggagtgcctggcatgtatgtgttaggtgcttggtgcccaacagtgcacatagcacacagggcctttgccctgcagaaaagatggtgtatttacatctgtatactgttcattcctatgcaagtagtctaaattacattgcaggactgaatagagtctgaggagagagaaaattacagccactaaaatagctcagttgggagagtattagattgtagaatgccatatataagtaatgatttgataggaaaaaaaagatcttcattttgtcactgttaatctgttttctgtattttagtagtgaaataggtggcaggccattatgtttggctgctcagcagtgatgacacaaaagcttttggaccttgaaacaatttttgttctggaaatgaaaatacattgtgatccatgcaggagatgttggccacagccgaggaagggagtgagacgagggagttctggcttttgtttccccggtggcagatcccttaggaaggctgacataaagaactccacagtctgttttggagaccgctgtgggcgtagggctctatgaaagaacagtttggatggtacttatctggcctcacccctccgtggagacgatgaaatggaggcctctgtgtcctcctttcccttggttagagggtcataaagttgagcctaaatgttttgcttaaaaaacaaccaaactgctgggtgttggtggtgcacgtctttagtcccagcacttgggaggcagagacaggtggatctctgtgagtttgagaccagcctggtctacaaaagctagttccaggacaggctccaaagccacagagaaaccctgtctcgaaaaaaaacaaaaacaaacaaacaaacaaacttttataaatagctgatatatattgtgcctacttctaatgctgtgctttggagcctgagtggtgaggggtcacagagtatacttcagtgcttggaaggaacaagacattggaaaacatgggagtggctcttctggaaccctagtatgtgtccatccatgtgtccgtgtattccccatgtgtcttgccccccacattccccctggtgtcctaattcttgcttctttgtagtgagtcattcctgagtttgcgttcctgaggtcagggcttgagctggtcacctacagtaagaagccacagcaagagttctgtctcacctgactgccctgctctcccccccaacactctctgctgcccctaggcagataggaaaatggaaaaagatgtgtgccacttcagctatagaagccatctcagacctgtcaaaaatgatagatttaagcaattaatgtttcaaggacctcaaaattatgttcttaaacctacctaattggagaaatatgctgtcttcattaggaagactgtggaggtaagcaacaagccaaaacactcagagagcggagtattttagcggtaatgagcgtgacctctgcagggctgacatgtgggaagcattgtgccagcagatagaccgtcaccatgcttctcaagttagaagccaggtcttcattagagctggccatgctcattctgacactcatctcgctcgtcggccaaatgcttgccatacttaatgaaactgcatctcaagaaaagtctgccttaattctatagtgtgaaatgcttcctttttatttctaaggaggttctccctaccttagatgatttttaatttaaatgccacataatataaaggataatttgtaagttatgtaggtatgaaatttgcatgctttctatctaatgtgactggaatttttctccagttacagcatagggcaagcccatcattctcaggtttcaaaaaagattccagctgcttgaaagaggagagctaaacagaacatttaatattttgaaaaatctgtcccgggggaaaaggcttcctgttcaaaaatatattaaattatgtagtttggccactctagggtgtggatattttgagtactgtaactgtcatttgttttttttattaagttcaaatggaaaaattgaaaacttaattttgacacgcagtcctttggccgcttaaatccgtgtgctgctgagatctgcgtagtcaaattcctctttagaggatatgtgttagttctcaaaattctcagcaaatatagctgcagccagacattcctctgttgagattccttccggcccagatgaaactaatagttccagcctgtgttgctgtcagtcattactaacccaggtagggctgctcactgttttaattttctttttctgaacttcaaggcagggttcacctatccccatgagaagtcagtgttaatgtgcctgggcttctagcgactgcagatagttggccctgtccacatggacacaattaggctgtgtttttgggctgttgtggatgggggcttgatgacagacataatacaggggaacaggcgtgttggggcgttaggaaaaataagaactttggaagtggatgccatagaaagcagctatttcccacctaaaatactttttggttatgtttgccatttgggggcagaatgtgaaattaattaaatgaacattatatttttgtttattataattcttttcactaatcacaagacttttagaaacatacaaagtttcatcaccagttaccattctgttcagaccagatcaaaatgggttttttctctctctctctctcttctcctctccctcaatttttaaataaaaattgcagttattcgtgtgtgtgtgtgtgtgtgtgtgtgtgtgtgtgtgtgtgtttgtgtgtgagatatggcggagtgcaaatgtggaggtcagaaaacagcttgcaggatttggttctttgcttatgcctgccacaaggtccaaggaattgaactcagatcctcaggctttacccattcagcctctctccatcctttttgcttttcttgatagtaccccaggctggctatgaacttgtgatcttgctgtctctgccatctaagtactgggatttcaggcacgtacatcatatcccacatgtttcatattttagattatctttgttaatactttaaaaaacgtcatgatggacagttctggttttatatctcagttggctctgtgatcttagaccagtgatgggtgatctcttagtctaggcttttagtgtatgaaccagggcagtaaattatagagctggtaggaggactaataacatggcagataagaagtgtctgaggtatgcccggtattcagaacatggtggttatagtgcttcataaattgcctccctgcctgctcgtttatcttatgttcctttcttagttctccctagttttgctaatttagttctcttccattggaacttagaagtgtaaaaatactcaatttacggataaatttgtcaaaaaataaaagctttgctggtcatctcccaagaggctttgcagacataggactttcagcttgacagtgtttcactgtcctcagggcaccatctttctggggagatgggacttaccaaagtagacaccgtgtgctcagatacagcctgagaaggaagctaacaaaggccgagttttcactaccactggggcatagctgtgtgtagcactgattcactagacttttgtgggagcacaaaggagaggtaagaaagggagatagttccggggcgcagacatttagtgatggaggtaaatgtggcactgattgcacacttgcttttttgcttctctttgaaattctacagaaaaggaccataccaaacggagaggtgacaacaatggtagaggcttggacaacattttggaaatcagtgaaaagctaagaattaggtgttggcagggtggaaacagactgtaattctaggagaagctctggaaagtcacagatccacatgcactggggtgtgcattagtcattgaagtatggacattctttattctcaggggaggagataaaaccctggtataacaaagggatttaaatagtgttagaaggtgacagatcgtgaagaagacagtggggtaaggaaggttaggcttgctgaggggagaggagagaagggcctggttatgttttacaatgaggtgggtgagtagattaacttgagcagtggcttggaagatagcagttgagctaagcccattggaaggtcatttgttgtaggcatcaagatgactagtgaagatttggagaatatggagacaaacttgagaaccaagattgtgcacatggttggaaaggagtaagagataagtcatggctggagagagagctcttttagaggacccaagttcggttctcaacactcatgtcaggtggtttccaactacttgtaattccagcttcaaggtgggggaggggacaggagggaatgtgacgtctctggcttctgtgagcactagcacacatgttcacatcacccccccccagatacacataattaaaaatatataaaatggagagatcaaagcaatggaggggtgtgagtaattatggaaatttttggccattataaggttgttctgagagtaagtttgttatggaatattattttaactaggcaaaggtgtattacatttgtttatgctgaagaatattactttaactgtgtaaagatgtgttacattgtgttgcatttaacaatgtaagaatgtgtgtttaattatataaagttgtgtttcaccctgcctgcctacctaaggcacctgagtgatccaataaaaagctgaatggcccataagtaggcaagagagggctaggcggggctgtgaggtggagagaaagagaagagtgagaaaaggaggagagaatgcctgggtcaggaagccaggcagccgcctgtcagatgtagagacagcaagcaaggcagaaaaagtaaaaaaccctgaggcagaaggtagataaagagagacaggttaactcaagttaagagagctacccagcaatgtgtctacacaaggctgagcattcaaaactactaagaagtcgctgtgtcatgatcagggagctggttggtggcccagaagaaagcctggttcgtaagctggactaacaaggttttgtcagggtcaaatgtggatgtgcatgccgacccgacagtccagcctcctgctggaatggcctgcactcagaaggtgactgggctgggtactgctcctcactcgcttgcctcaccccaccccatcccacagaagcacacagcagagaaagggaagtgatccttagacagacgagttggaaggtctataggcagtggtttgggggtccccattggaatgactcctctgcattttagcccgtgatgatgtcacaaggatggtgcattgcacaggtttgagcatagctattgttcacttggattattgctctctggacttgagcagacatgtttgaacaaagtcttttgtattaatgaaaccaaaataggtgaaaaagaatgtgaaaggaacagaattagggtcagaacaaaatacttttcaaaacttgtaaactcctcaggcagtgtctataaatgagcaacagggcacttgcccagcatccatagataaataaaggctcttggtcatttaaaatgtcacttgttcagcaggagagttaggaggtgaaataggacagtcttgttttaaaggtacagttgaaagagtgaggagatgtagtacagagtggagggaggaggctcaggacaatactcgggaggctgcataacacttgactgataaagttcaggaggtttgacatgagttctgtggtctggactccagcacttggattggtgaatgtttttctgctctgtttttctgctttcactattccgtgtgaatacaacatagcatgtgtacatagtagagtctcagacattttgactaaaattagcctcgtcttttgtagaaaagaaacacaataaactaagcaggagctaatgaataggaaacattgagttttttttttttttttagtcagttgggaatggtgtgtgtgtgtgtgtgtgtgtgtgtgtgtgtgtgtgtgtatgtgtgtgtgttttgttttgagacagggtatcattgtgtatctctagctgtcctggaacttgctctgtagaccaggctggccttatttccttatttcttaatgctgtttacttacactgatgtacataacagtggtggtgtgattgcattcagaggagaggagaatgctgtgggagagctaggatggcagtgtggaagccgtggctgctcatgtttagtcgtaggcatgacatctagacgtaactgaagtgatggctggagaagggcgtgctaggagccctcacctccattatcgcttgtctgtgaaattagttatagatagtggacatttatttaggtaaaacaaaaattgaagtcatttgatgccaccaagttgcatccttctgtgtactgaggccatgtctgtctcctgaatgtctccagggagctctttatgcgtgatccttgtctttttcttcctgcttccatactggactcatcttttgttattgttgatcatgttctgttccagacaggttcttttgttgacttgctggtggtagagttttgagaggttctagaaactttaggcctggagggctggagcaggtcattgccagtgtgcctttgacagtgataccagtcctttcactcggtgctttctgcccacctccttcatcccctcccacctctgtgatgttctgcctcagcacatgggcccaagcaaccatatgacccaggaaccagaataaatcttccctcttttcacttactctggcaggtatataggatacacaagaaaccagcacctcccagaattgatgaggtcttttgacttaagagtacagtgagtgtaattgtagccacatggcctgggggaccttttgctgtgagttgttttctctgctaaagtcgtttgtgattctcttgtagcttccaattgatgataacacatttcactataatgaaggcctctaatatgccagtgttgttcctttgagttacttagtgtttattgtacgttctgcaaggtcaaggactgttggctctgtttactgtttagtggcagttaaagtacatgtgcatagtagattcccagatatctaactgacattgtcctgtgtcattgagaaggagattgttagtgtttaaacgaacatggcttttgagtgagacaagcctggatttcaaacccatctttactatttactagccatttttcttatcttcccttgtgaatcccagtttccttgtctatataatagaaatggtcattgtccctctctgatggaggttgttgtatggattaaatgaaataaagcagatgaactacttagcacacagcaatggctagtgtgtgctcaccctggctattcttgccttgtttctgaatgatgctgtcactgtttgctcagactttcagagcttccatctgcttggcaaaagggatttttctgcttgtaaggattcagcaagtgttgatagctgcttttagtctgtctgcacctctttccctctctctcaaatattaccactccctgcacttaacacctaaatccctctaacttcagtttttgtcatcttctgtttcttataattttctttctgctctttgaaaacatcacagtaaattattcatttttttttcattaaagtgatgcttggcattaacaaagcaaaaggaaaagttatgccctttctctcaattctctacggatactaagagaggtcccacagtgatacacacaagtcttagagaaaacattccctcaggaggtaggtttgttttaactaatacctattgtgtaacttctagtacattgagaaaatgtctttcacagagtattctccaccccatggactgtggattgcattcagagaaagtaatgagaaaatttgtagtactttggagctggggtgtcctccaaggtgggagtgtgttctgctctctgtccactggaggcggaggactgtgtacacagtgagtgagtgtgtgtaagaaccaaccagccgtgcagccatcgtgcttatccctgtgtttctttttgctacactgtgagactggtgagggcagtggtactttacgtctccatcctgctctccctgatcccttctgcttttacatgggtaaacctctcctgcccttgacctggttgctgaagcacttgtcgcttttgtagtttttgaagaatttgggccagttgttttgaagaccatcccacagtttgggtttgtgtaatgaacactcttaatgagagcaaggctttgcagttctgtggagactgtggaagggccatgtgctcccaggtgtgtcagtgggcacatgataccagtttgtaccagtactattgatcatttggttaagatgcgcaggacgtttccccagtgtcaagttacagtctgtccctctgcaaccctgtgtggtttagagtagttgctcctcactagatgcccactgttggaccctgtcagtcattggtgctgtcctactaaggagggcttcccctttatactagtttggactcacagattcttattttattcaataggttgtattttattactgacattaattaatttattactggcattaaacattttgatgcttaaattagttcaggtctagctaatgagcccttgcaaatagccttgcccttttgatggatcttcatcacttactcagtctgttatatttcagttatattaaggtattcaaagttcttgtactttctagcttagccctatgctcagccatttctctatggtgccctgagtccttttcatggaaagtggtattttaaaaccaagatctgagtgtctgctgtagtcattgctgctaacatatcattggtcagagacaccaccagggttcatgcttttcaggaaccaagctaagaaatatatgtgtatgtctgcattctgtctaaattaaagttcatattgattgttacaactctaatatgacacttcagtattcattctagattctgttcataactttctaacagtgaaaaactctacatagtattgttttctgtccctgttagaacacctgctttgtcattaagtgatatgtttgaatgaaggagttaataaacagttacagtgttaggtatcctcattatattgtcagtttttggcattaagaagcaatatcttcattttttaaaaatttttgaccagtggttctcaacctgtgggtctcgacccctttgacaagcctctgtctccaaaaatatttatattatgattcgtaacagtaacaaaactacagttatgaagtagcaacaaaataattttatggttgggtcaccacaatatgaggaaccatattaaagggtcacagcattaggaaggttgagaaccactgctttttgattatatgatatacaactatataaatatccttgctttttactgtttaaagtatgaatatgataaattattcaattattgtgaactattagtatctagcttttttccaataagaaaaagttataacttaaaataaaattgctcagtaagaaaaatagctcctttgtctgctttcaaacgcctcagctgtaggcagcagtattgaacagatttcagcatttctaattacagaattcgcttacagactttgtctggctcgtttttcacacctgtcagctgtagcgatgtgaaatatgttcttcatctgaatcccttcctgtgcctcctgctaccagacagagagggtcccaagagggtcccatcactgctgcttgttactaggctgctaaaacaagaatgcttggaactaacttaggagccggtgaccagaaagtgctgataacctgaggactcattcccaatttacatgatcaactctgtgtgtagttctgaggaaaacagtagggtttccttccccggtgccctccatggtcatacagtgacactttaggacccaggccattgttggtttttcccagtgatgtaattaaggacacacccttttctcacaaacttgtattttattcttaggaacatgctgtaggagagatctttctagtttcagtcttttgttgatttacctcaggtgtgttagttgtagctgtggcatctcgtgccagcctctaatgtgagtcttgctctaccaggcaagtagggaagacagctccgtgctcagcatggcttctccacggaacagctgggaagagcttttgttaaagacacttttcttcaccgtggcagcttttctgacctagattcacatattagttttaggttcttctcctcgtctgtatgagggagtgggtcttttcaagctgagcagaaagattaaccctgggcctttcaaagctgagcagaaagatgaagccttaaaagcactctgatcagagagacattttcttgtttaaagaaacacggaaatggtaacataaatgaatagccttttgttctagagtaaacttgagagccacgttccgattattcaagcctttcaagtgcagacattgggagataattatgttctgtgagacaaggtgtattgtcacattgtgcatccctgctccctattttggtttgtttctataaacataagttgtctaaacattggccccatattgctgacacacacacacacacacacagctgttaaagcatgacctactggctgtagttccaaatatatctttgtacttttagccagttatgatgttgttttcattttcaattttcagtcattgtccccgttggcttttatgacagtgcagtatctttttaggattacacaggaacccccagggatacaacccagaagaggaatgggaaaggaaactccatcctgctacaggtcacagaggttcagtgttgacaatgggagatgtcgttgtcagttaaagtgcttttccctatttccctatttccaatcacaaatgtggaagaatatttatttataaagcatctttaaaagatacacaataaactctaaatttaatcaaatcatggaaggtcagtttgagttaggaagcatcatgaatgtagagccataggtgtcacctagcaacagaagaggccatgttcctttttcccagggcatctctggcagagcagtgttcgttcggtacacggtggacactcagcaaagatgttttggaaggatgaatgaatctcagcagcttctgtctgacttttcacttattattgtttttaattgaaaatagtcttctttcatatagttgacttttcatttttcagataaagaacctttatctggagatggaatggctaaggcagaagcagagccccaaagtactttattctcatttatcacttgctctgtctttaaaaggggttttattttcaagctgtgtaatagttggcactaagccaagcatcatatgtgaaatgtttacgagcagtgctacagtgccctgactgattatagctgggatttgcatatttgttgtctgtaaacgggcagctataatgttctcatggagaggtacttacacagttgcattcttgagctaattttttttccttttatgttgttatcactatttttgtttaccttattggtaacttccctattgagggctgtcatcactgcatttattgacagagtgtagtgttactgacttgagtatgaagagacttcagaaactgtcttgctgaagcaattcattatttacaagaagaaatagacctccaggcagttaagtaacttctcagtgccatgtcactagatggtgacagagctggaagtagagcctgggttttatgctctcttgtccagtatatttttgttgtgaataatttacctctgattggctgttaatatacgaaatcagagttttggtgcagatttatcaaggcagtgatatgtgataaaatatcaggcaatggggggcagggttacagattagtttcactatggttttcttttcctctcaagtgctaggggccctatgcctgttgaagagggagttagtgaggagatgacctaaagagagaggattcctaggcagtcagggttggaacacacttgcgggatctgaactgctatcagggcagggagaatgattgtggggagaataatgctgttgtgtctgtaccatgtgatgatttacagggcctgcagacactgggttagcgctgccggggctgatcaaaggcttagccaggagagaaataaaaaagcttaaaccagcagtggcagatactagactttcctgtagagaaatgacttgtctaatgactggtcctgagtctctatgtgctgcgtatttgcagcacactggcattctggaagctgatttttagatgtgctctgtggtggtttgaaagaaaatggcccccaaagggagtggcactaaggaggtgtggccttattggaggaagtgtatcaccatgggggtgggctttgaggtctcttttgcccaagctttcctcattgtgactgttagtcaacttcctattgcctgcaagatgtaggcctctcagatactacagtaccatgtgtgtctggacattgtcatgcttcctgtcatggtgataatggactaaacctctgaaactgtaagagagcccctcaaattaaatattttcttcataagagttgccatggtctggctgggcgttggtggcgcacgcctttaatcccggcactccagaggcagaggcaggcggatctctgagtttgaggccagcctggttacagagggagttccaggacaggctccaaagctacagagaaaccctgtctcaaaaaacaaaacaaacaaaaagagttgccatggtcatggtgtctcttcacagcaatggaaaccctaactaaaacaggctctcctaagttgagagttttcaaatgtttatagttttgattcacttacttttaaaatgtatttcatattatttcagaaatttcttctatttagtgctaaatgtattaaagttagtatatatgatggaatattgtatgggacattgtttccatataaaatccaggctaatattttttcataatctctttgagtaacttaagactggagccatccttctgctagaaatggattgctattgtatgttgtggattttctaagtcctgagtctctttgagcctttaatatcataataaatactcttgtaattttccaggactggggattcttggccctaagaagttgcttggttaatttaaatcatagatactaataaaagaaaaaaatatttggggtgtaaatatttactgagagcatgttagtcacaggtttcacatagcaccaacaaagctgttcttcatagaaaaactaaagactaggcaatttaaaaactgaggaaaacacaagtgataatttgtgtttgaggtgagaaaacagaacactatttcttttcctagttaaaggcatgcattttataattaactccttcattgtagtgacatcaagttaatatttatagtttgtaaccaggtcctacaattaaatactgcattaaaactttatttgtgattattattgtgtgtgtacatgatgtgtatgtggaagggacacatatgccatgttgtgtgtgtggaggtcagaggataactctgatggagccagttctctttttcttcctctacgggctccaccgctcagcgtgagtcattagacttattcaccaggcacctttgcctgctcagccatctcaacagcctaacatcttttttttcttttcttttctttgttttttttttttttttggtttgtttgtttgttttgagaaaaagtttctgtttgtaacagtcctgaatgtcctggaactaactctgtagaccaggttggcctggaattcacagaaacccgcctgtctctgcctcccgagtgccaggattaaaggcgagcgccaccactgcttggcctaacatacattttaacaaggaagccttccactgtataaagagctagtaaagcttgagaaacccacaggaagtgtctgacctgcaagttccgaatgggataattagtgggttcaggctacgaaaggacaaagtaaattgctcatgagggagtagttatgaagacggtgagagggcctaggtggtggtggcggcggcagcggcggcacacgcctttaatcccagcactcaggaagcagaggcaggtggatctctggaagttcgaggccagcctggtctccagagccagtgccaggacagtcagggccacacagagaaaccctgtctcaggggaaagaaaaaaaccagacaaaagatacaaagaagttaggaggtctgtgctgtttagtccctggcagcttttaatgagtttgctgaagttaacctgcgtgaagacctctgccgtctctccctatggctgcgactgattgctttattgagagacgttattctggttgactcctgctgtgagatgggggagaagcgcacgcacggaggatggaaacacctggctcgtattgctgtgaggctgctggataactgagcttgttgggccttaagtcctttaatttctgctttaaaatagtattctcatctcaggctgcatatgcaattgctccttttctgcatatactttaagggtattaaaatgtgctgaattattttgacttttttttcttttgtggtggaagcttaaggagcacatgaaagtggttggtgcctttctgggcacctgaggggcaagtgttaatttaattataaatagtaccaacaaacacttgttaaggtctgttaaaagcatgcatgactcttgcttttgacctgcttttgttgttttgctttgctgagatgaggtcttgtcatatactctagattggctttgagcagggagtcctctgctgagaaacaggtatgtgccaccatgcttggcagatccttactgctgtaaaatttatttttgctattaaactttagaatttgtccatgatttaaatgattttctaggagaaaaatatgtggaaacagccaagaaaattccagaaaaggcaagtgaaatacatcctcaggtggcaaaatgaattattgataatacctgcttcttcagaatgtcatcagggttaagggtatgatacctgcttcttcacattgtcatgagttcttggtaatacttgcttcttcagattgtcatgagttatcggtaatacctgcttcttcagattgtcatcagggttaagggtatattacctgcttcttcagattgtcatgagttattgataatacctgtttcttcagattgtcatgagggtacctgcttcttcagatagtcatcagggttaagggtataatttatttaaaattcttagtatggtatgtcacacagagcaagtatttaatgtttttgtgtaaggtgtgtgtgtgtctacttttacatatgtgcacacatgctttggcacatgtggtgggcagagaacaaccttgacattggtcctgatttcaccttgtttgagctggggtatctctcctagttgttttcccttctttgctccattttgcctgttaagcaccatgtatgtttttcttttgtgaacattagatcattttgtaatacagatatttttaccaacacagccaatacctacaatagtgagccaataacaagtttaacaatgctctcagtggatgccattgtctctaaccattactcatcactgagctgatcagtgacactcctaccctgctgctagagaagtacatactaaatagcctagctcttttgttttctgtattttaatgggttcagacagtacttgcacagggtgtgccatacccatggccctggactgtgatttggttggtgatctcttggcactcgggagtgtgttgtgtggacgaccctcttagaagaccctttcttcctctcccttgccactgtgtccctgtattttgagaaaaggagagagtcggttaggctgggctttaagagtagttttacaaaaagatcaaatgccaagttcattggttgtatttagagaatggtaaggacacagtggctgttatgaaagataagaatgggcaggagggtgggtcactcactgtcttaaacgataggtttaaaaatggaagccagaaagcctatcgccttgcacaaaacttaagtcaaaatggatcaaagatctcaacataaatccagctacactgaacctattagaagacaaagtgggaaatacccttgaatcaatcggtacaggagaccgcttcctgaacattacaccaggagcacagacactgaggtcaataattgataaatgggacctcctgaaactgagaagcttctgaaaggcaaaggacacagtcagcaagacaaaacagcagcccacagactgggaaaagatattcaccaaccccacatctgacagagggctgatctccaaaatatagaaagaagtcaagaagctagtcccccaaacaccaaataatccaattaaaaagtggggtacagaactaaatagacaattctcaatagaggaatctaaaatggctgaaagacacatgagaaagtgttcaacatccttagtcatcagggaaatgcaaatcaaagcaactttgagataccattttattcctgtcagaatggctaaaatcgaaaataccaatgacagtttatgctggagaggatgcggagaaaggggaacacttctccactgctggtgggagtgcaacttgtacagccactgtggaaatcagtatggcgactcctcaagaaaatgggaatgagtctaccacaagatccagcaactccactcctaggcatatacccaaaagaagcacattcatataacaaggacatatgttcaaccatgttcatagcagcattatttgtaatagccagaaactggaagcagcctagctgccccttaaccgaagaatagatagagaaattgtggtacatttacacaatggagtactactcagcagaaaaaaaacaatggaattttgaaatttgcaggaaaatggatggaactcgaagaaaccattctgagcgaggtaacccaatcacaaaacaaacatgatatgtactcacttctatgtggacctgctttatgatacacagtagtgaccatgctttatcagagctgtttttaatgatgtggctcagaatggtttcctcccagatgatgattgagaagctaattaaaaaaaaaaatggtgccaagtaccacaagaataacaacaacaacaaaaaaatggaagccagagatccacctcattgatctgagctaagaagagttccagggcagcctgagctacatattaagaacccatttcaaataaaaaggacaacagcaacggcttccccaccccgccttacttccccaaccaaaaccaagtatgaagaaataccccatgctgtggctgaagcagaaatatggcaggttagagggcatctgaagctacataacaaccatgtcggagtcaggtggagacacacataggtgcttccgtggcccctgcttttataactagtgccctagttatatgttgatggagactctatgtgttttataactagtgccctagtcatatgttgatggagactctatgtgttttataactagtgccctagtcatatgttgatggagactctatgtgttttataactagtgccctagtcatatgttgatggagactctatatgttttataactagtgccctaatcatatgttgatggagactctatatgtttcttataactagtgccctagtcatatgttgatggagactctatatgttttataactagtgccctagttttatgttgatagtgcccatgttaacatgttgatggagacctgttccatttatttcctcctccacttccctcttcccaccccatcccttcttttctttttaactaaataaagaatgttgcagctgggcaagggtggcacacacctttagccacagctcacaggaggcagattgaggctagtgtggactacagtgggagttccagcacagccagggctatgcagtgaagccctgtctcataaacaaacaaataaacaaggaagaatgctgcaacatatatcttgtatatgcttttttgatgaaactttaggttcattcatagagtaaaccctagtggcaatgagtttctagatgaaaggactttagaagatgcatggaagtctgttagtagccataactgcccttcagagacattaagcctcctaggtgacactcccagatacaagtacatttcctcacttttgccaccaccagccatccacatcttagggttctgattggaacaaagttttgttctgagtaagtaattttgaacttattgttaactttgtaagttgttcacatcttctggcacagtcagttacctgccagtagttatctgcttcttcctaaccagctgttttctgatacttaggctggctccagctcgctcagtggctgctgacgatgcatgactgagggcctgcagaaaggagctggctctggcagtaaggtgaaccatgtgactctgccagccaatgtgtccatccatgtggaaggtaggggttgttcacttgccacattgtagaaaagcaattttgtaaacataaaccattataaaatcacaatgtcagtgttgtataagttcacttacttttgagaacaaagtttcaaatttcttttttaattctttgaatacagggtctcagttctattcttggatggggtggagctcactatgtataccagtctgtccttgaactcacagagctcctctcactatgtagccttggctgccctgtaccttcctatggagagcagtctggccttggacccacagaggtggcctactatgctggctttagaaaaaaaaaaaaaaaagccacttaagaaaatcctcagagagttccagaagagctgtcatggttttgtaggaaaactactttgtaagtaattaataataaaattattttagtgatagtttttgaatgactggctaataatttagaaggctttaaaatactttcacttcatctgcttcttcaaaatttctaacttgtgtgtgtgtacacatgggtgccgcagaatagaaaacatttatagtctatcaatgggcagtacgaaaaagatggctttcttttaaaaatgtttttcttgattctctaagatctcatacacacacacaatgaactatggtcacacccactccatttctccccccaactcccccgaacctgcccccaacttcgtgtcttcttcttcctttttataacccacccatggctttcttttgaaataagatattgagagcagatgttctagtcctgccactttgactaaatatgaatctcaggatgttcccacggcgcctgatgcttggaggttttatgattactgttgtagtttagcctgaatgaggggcaagcatacgcaattccagggatgtggctgtgagtctcagtgccgcagtcttcatgcggcctgcacggcagcacgggctgcagccgcctcgtgtgttagtccagcgtgtgctgctccctagcatctccgctcccctcttctagtcctctttactccctgagcagccaactggagaccatttggtctgcagaatcccttagaccagtggttctccacctcccagggctacaaccctttaatacagttcacgctgtggttacccccagccataaggtgattttgttgttcttcataactaattttgctactgttatgaattatgatgtaaatatctgatatgtgatcccaaagggatcgtgactcacaggttgagaaccactgtctcagaatcttaaaattgaggatctcaaatcatttttgttggagttcaagctaccagccgtccctcagcagaaattaagacaatgttagtatagcctattcattaatttgtttttgaaatatgttgcatgtcaatgtaagtaacgtttcgtgagaaataactagtttccaattattctccattgtttgagagccattttaatgtgtgacttagtgggcagcaccggggcttcctgtctgctcctgtatcctgttgaaacaccatgtaccatctaccccgggaaatgactggacattgtggagagaaggagggtgaaggggctcgctatgatttgtattgtcaggaaagcccttttgcagtgcagatccctcaggaaggtctgtgggtcatctggcactttctctctctctggcctgaggaagaaagaggtgttcctgcctggctgtggcctcagaagagcatttatcttagggagagtttgcccagggcctgatttggggcacgctacccccacccctttgcttgccctcatcatgctgtaggtgggagtctccagctgattggcactctggtttcctttaaagtgcctgcatttcgtcctgtaagtctaccaaaggcctttttctcttggttactgaaaaacgttaaactaatgggatggaatctgctcagtgtttgtttcttataaatcgttcaactctgttgttcgtttctgttaacaaacatcagtagcaaaacaaatgtcgaattaggtagtagtattaatgacagatatgaactaattatttacagctgaaagctttttttattgtgatacccagacctttggttgagttttgttacacaatgtctatggtactgttttctgctagtgaaggaattgctaatttgtaatacagaattagatatacattgttttatggtgtagtatctcacaacagtctgatgttcagtacacagtaccatgagaattgttctgacaccgatagaatggatgcccaaggtaaacaactgagaaggaggagaggcttgttttagagatctcagcacatacagttccttaggctcatgctgggcattatgccacgtgggatgccacgtgggatgccacctgggatgccacgtgggagcaggtgctggaggaggcctatttacttgattccagccaggaagcaaagagagaggagggcctcagggcttcattctcctttttgttaagctttgaaaactcattctcataggctggccgtgtctggggaggagggacccagttgacaaaactatccattgggaaaggcttttgatggtattccaatctcactgtctgtttcctgctgcactgagatgtgaagtcatcgtcacatgattctgccatcgtgaacattaggaacactgccattcctttgccactgcaatgcacaccaacagagaccttgtctctcctgggtggtttctgtcgggcttttacatcactacaacacaaaagcaaacaatgcattcttcaagggctcaccctggtgacctaacttcctctccccactttctgaaggttccatcacctatggcaacacagattgctaaccaaaccattggcactaggcctttgtcggacacgctgtgtgagaactgatttttctggtgctttgctatatgaacaagtttgaaaatacttgcagaatgcaaattggaaagacatatgtagcttaaattgatgtcttttatcttagttcgagttacaactgatgtgatgaaacaccatgaccaaaaagcattttggggaggaagtccatataatagttgattatcaaagcagcaagggtaggaactcaagcaggggaaggacctggaggcaggagctgatgcagaggctgtggaggagcgctgctcactggcttgctcctcatggcttgctcagcctgctttcttacagaacccaggacaccagtccagggtcagcacactacaatgggctgagccctcccccatcagtcaccaattaagaaaatgccttaagctgggtcttatggagacattttctcaaatgaggttctgtcctttcaaatgactctagtttatgtcaaattgacattaaactctcagggcatctttgtacagcataaagttctctgcatctcagccacagagagacaaaggcatgggggagaggccctttcagtaacctcttgactaagacactgtctctgatacagctgatgtcttttacatttcccctttgtgcttttctcatgctaatggcagagagaactacaaggacagagtggcatctaccatgtctgttaacttgtattgctttatgccacagacgcagggattcatgtctcaagatgttttgactgagcatctactagatgcttaaaaggtaggaagcaaagctagcagagtcacattagtcagccttctcttcactgagtagtctaaccctgctgatctgtggatctgtggtagaagggctcccagaggctcctgcattcaaatgcttagtcagtcaccagggagtggcactatttgaacggattagaaggattaggaagaatgtgtcactgaaggtggggtgggctatgaggtgtctaaagccctggctctctcttggcctgtggaccaggttgtagcctcagctacggctccagggcttcgtgtgctgccatccctccaccatgataatggactgaccctctgaaacgtaagcaagctcccagttaaatgctgtcctttatgagagttgccttggtcatggtgtctcttctcagcactagaacagtgactaggacaccgtccaagggaggaggaagttttcatgtacttggatgactgagtgttgttagagaccatcttaccctgtattttctttgaaaaataaaaatgcaaagctgtcttttcttgatgtaaacaacttaagggaagagatatttacttgccatggtcatgtgacttttgcttctgggcctgtgctgaggtagaatgtggtggtataccatggtgggggaagggcgttcacctcgtgagcagcaggcagagagacaaggattacctttgagggcatattcccaatgacttctgtcctcccacccagcttcacctcctaacagcgcatgctgcattcgctgtgaactaaccagtcaccctcagtagtgagtgccatcagctgggatcaagccttcaacacaggggaagacatttcatatccaaccctaacagtctcaaagtacgctgtcaggtagagtgccactgactgaggagaggacctcagatcttcctggtaaataatacctgccttgctttttaaaaggggattagcacagtgtagagggcaggtgagttcggatgtgcctagcaggaaccagccctctgaagctagctggaatagactaaccctgtcaattcaaaggtaggaaaccctagtgtgctttgtgtcagaactgctgtgaggccataatcttgtctttcctttgaagagcctttccttacagagggccaggtctctgacctacaaagccttgaaaggaaattcctttatgagtgtgaagttgctgcaggtgacttgacacaccatgttgacctaaacagcttcaagggaggtctttagggggaaagagttccttgtttcaaaggattccttatggaatttacagttcagtgtgatggtctcagaactctccactctggcatgtttgcctgcagatgtttcgggggatggtcagtttgctgatacatggcacaaactttacgttacacttgaaatatgtcttgagacattttttatagccagctagagaggggaaaatgctctcagaagctgaaggctcagtttcaggaataccaagttagcctttcttgtctggtgtcagattaatggggagttgggaactgaaagctggtatgtgttaccctaaaatgctgcttgttaagacaggcacatttctgaaatagttgtttgagacctgaagttcatgcccctcttttcctgcctgctccaacttccagtcataaccagaatgtctacattgttcagttgattttatttaaaaaaaagacaacttgttggttctttctggttttaataaatacacagcttggcttaatggtttcctgaattaagtaagccaaaagctgcattgttactgtttctaatatttttgtgcttaaaatgtggatgccattgagaatggcaatcattttcctaatttggcagttggaacagactttgggtcacaactctttagagacgtgaccccgctgagtgagtgtcctgggattccctcccatcaaacctgaattcaggttccctgcaaggccctgaaacattgacggttcagctttgtgcaggtcacagttttatgtagaactgcaaaatgaacctgcctataagttatatagagcttatttagaaccaagctggcatttcaaaccaggtttatgctttctagaagaacatttattaaactttataagatttcttgcaatattataacatggccctagatgagttttccccaatttacttttaagtggtgggtgcatgatggagagaggctagtaaattttaattttagatatgctgtgcaattatacaatcataatgaacaccatgtgttaacagtgggttgtgcacttgctacatggatgtgaatgagggagagcagatcgtgtgtgtgtgtgtgtgtgtgtgtgtgagtgtgtgtgtctgtgtgtgtgtgtgtgagtgtgtgtgtctgtgtgtgtgtgtgtgagtgtgtgtgtctgtgtgtgtgtgtgtgagtgtgtgtgtgtgtgtgagtgagtgtgtgtgtctgtgtgtgtgtgagtgagtgtgtgtgtctgtgtgtgtgtgtgagtgtgagtgtgtgtgtggtgtgtatgtgagtgtgtgtgtgtgtgtgagtgtgtgtgtgtggtgcttatattcaactctatttatatgttattccatatgttgaacaaactaatcttaaggagaaggaaaggaactcttaaagtaaaatttctttattatttgtattgggtttaaaaagtaaaagtatatactttaagtaaatttgttcttgagcaaaagaatgctcaagattgggtagtataaaaatgatgataggagctggagcaatgactcagtgacagtctctttagtagtcatgtcagtttttgtgtgtatgtgtttttctgcttcaaagggttttaataaattaattataagtatttgtatatggattttaatcttgaaaataaacacttaaaaaaataaaaacattatgaaatactgaaatacttttttgtttgtttttaaattctagttccatttatcattcaagtggcaagtctttccacttcttactataggaattttaggaaaggatgttgggaaccttttgtggtcaagacattttaagaatgaaaaaggctcttgatcttagcaagctagaattaaataaattagtgttcaagcctctaaatgccagctgtttggcatccagggttcatggatgggctctctgttgaactgatgggtggtgaagctaagctgttttccaaactttcctccagttctgcagactgtttagaaagaggcttttcaagaggctataactaaaagcagggtgcaaacagcagtctttggggtgatgtctttgatgtatgtgaggaggattctcccaggaacggaagcttctcattggctcattgtgtcactttgtgactgtgtcccatgactactagccacacatcactacagcttagcagactgtatcctctgaggcacaggctgtaatacacagacaaaggaaaagcagcacggtgtgtcagagacatccagctgtgggaaacaattacttaagaattaacgttgctagcattttgtaagcagaaaaatgaaggcaactttttattttgttttcttgaaaaacttttcatcctttctcattttctttcccattttgctgacctcatttaagaaagtaattttgtattgttctttcatgaatgtaggtcattttgaggtcaatcatagatgagaactgtgcccttcaactgttgttggcttgtttctaagtagtacatatgagctataaagtaaattggtgttaccaagaagacttacattagcatttgtaactctgtggtctccagccttgcaggtatcctaagtgatttgttgtttctttgtttgacacatattctcactatgtacgaatagctcaggctggcttcttattcaggatcctcttgcctcagcctcccaatccctgatgttacaggtgagagtcacttcataataagtgactcttattataattgttataattgttaagtaggctcattcactcatttattcatcatgtacagttattgattgcttttatatagctggctttctctatgctttgcattctatatgtcacagtgaggaaagcaggtgtttaagggataatgcgtgcacatcagttatgtatctggcattgttaaacctgggattatgctctgtggagacacaaggaagcactaaataagtacttaaaaactaaagtaatttcagatactgcattagtcagagttctctagaggaacagaacctaaaggattaatctatctctctcttctttctctgtctccatagttacttatttagatttattagaatggcttacaggctgaggtccagctagtccaaaaatggtagtctaccaatggaaggtccaagaatccagtatttgttcagtccacaaggctggatattttaactagtcttcagtacatgcctgaatcccaaagaagtaggctccagggaagaaatagacttgcccaagagagtgaggaccagcaggcaagagcaaactcttcctcttccatgcccttcatacaggctgccagcaggaggtgtggcccagactaaaggtggatcaccccacctcaaaagatctggatgagaagtggctcttcccacttcaaatgacttaattgaggaaaatacccctcacaggtgtgcccagctgcttgggtttcattaattccagatgtagtcaagttgataaccaaaaataacatcacagataggaattagaacttcaaaaacaccaacacagggagagctgttaagaccctggcctggcctactttatggttgctagaggagatcaaaatgagtataatcacaggtaaatatagctgccataaaggaaaagtaaagggtgctgtgaaatgagggtgtaggagggacagggaaagagtgcaggcagcagtggtgtttgtgctgagtggagctgtgtctgtgcctttgccgactcctgtggcaggtggagcaaaatgagaagcttgaagcacagaggtttatggattgtcattgtgcaggctgaaaatctaaggtcacaatgccagcgcagctggttccttctgaaggctgaggggcagttggttctgctctgtctgctggcagtttgttgcaggttttacagttacctggtggaggaacacgtcaccctgatccatgtcatctgttcacattgtgttcttccatggtcttcgtctgtcaggttcccacttctataaggacatcctcatgttggattaggggccattctgctctcctgtgcaaccacctaaatgaagggcggtcacaacttttgttgccaaataaggtcacattctgaagagatggttttattccaatgtgatttgataaggtacaagaaattgtttcttgggctgttttaactttggtatgtttaatctgtttctggagaaaataaaatattttcagaaaatacattgcaaaggtctttttcagaaactgcactcagctaatgtctcatgagcaggatgctgagtggaagatgaagctttggctttgttgagaaatttgagctctgcagggtcaggggtgggatcttgcttgttttgttattttattttatttttttaaagattttatttattatgtatataacatctgcttccatgtatatctgcacaccagaagagggcaccagatctcataagggatggctgtgagccaccatgtggttgctgggaattgaactcaggacctctggaagagcagtcagtgctcttaacctctgagccatctctccagccccatgttttgttattttaaaaagaggaaaacaaagagacatttgtaagctaatgtgtaatccagtagagagggagaccttgggggtacagaggagacatgagaattcattgatgatgtgaactaagtagggagaggagagagatctagcacacacagaagagctagccttagagctgagaatggggtggggcagggaggtgtcaggagataaagtactggtaaggcattgctctgaaagtgtgtgcacccgggttcagatccccagcaaccagagaagagccaggtagacatggagccatccataatcccagcaccaaagagccatagactaagggtcctttgggcaaattggctctgagatcaggtatggtgagagatcctgccttagtagagtgtggagcaattgagagaacacaccagacatcaacacattcatgtgagcacaaatacctttacacacgtgcacacacctacatgctcgaattcatgcgtgggtatgctctaaagacatagacatacagagacagagatgagagaaatgaggacaggtaaggtgacagaaagctacccgggagctggtggtgatgggtgatcacttgtgagtgctagtgtgttagcagtgtggttgtaaggaagtagttcactagtcagctggggggagggagggggtatggagggttcaggaaccagggagaggtgtgaaatcattagctgaagagaaaagagtaagtcctcacaaaagacagggcttcatctgggtgtgggcacatgtcgatgttccctacacataggaggcagagccatggaggatggtggctttgagatgagcctgggcaacgttgcaagactgcctctaatatacagaaacaagcaaaagactgtgttttcaagagactgaaggttaaggctgacagcagctgattccaatagatggccgcagacagtgagatggtgtactaaggtgagtaggacactgagaaggagctctactcagtcatttccccaaagccgcaaaccctacagtcccgctagaaggcaactgaaccagatgcaggatgcgagttacaagagtcgtattaacaaggaaacgggtatttcggtatgtcccaaaataggtatttaatagtaaaataggcattgaatagtaaaaatgtaagcatattatgtaagtaaatcttctaaaccactggtgaatttgggttgtatgttttctgtgacaaatgcttatgtatgctcctcccctttccagtgagcgaaaaatgaagctgcaagctgctgttcagaagcttctggagtcccgttggtagtcactggttagaaatgtcagatatcatatgcccttaggctatactatgaaaaattgacaggtgccacatgcttgacagtggcttccaaagtaccaaagatcaatagtgtacatctttggtatatctgccaccaggctagggacgcgattgctcctgtgtgcttaatgtgtgggcactgccccagcaggagaccaggagttgtacctagatgcactttaattctccctgctggcaccagtgtgaacgaggacagcagcactcaggtccaccaaacatcctcagagctgggcccctagagttcaagcccctttagggaaagtgtgctgtgtaaggggtaggaagtctagaagaccaccaaggaaggaaaggtatctgagtatttgtcagtgtgaggttttcaaccctccttgtgttttcagtgttaaaaagtaaagcccaagtttgatgtctgaatgacttggtagatagaaaactagtttgcacaagattcccaagcctctgcttttaagtgaccatccagcctggggagtcattaccaagccacttgttctgcagtacaccaaggatgctacttatgtattaactatggacttttccagtctctttgaatgcattagtgttcacagtggttaaaaatagctcaaagctcatttctgagatagctccttttaatgtgatacttaatagaaacctttaaaaacctagaaagcctagaaagtgtctttatcttgaggtttctcagggaccctgtcttaaccaatgaggtgatttctcttcatttaattatagtattggagtatttgacttatttcaaatgtgtgttgtcactagaaaagcaagattttcatgctgttaagtgtgcttgctggtaaatgcaaataaaataattttagactaatgctgttggttttcttgatggagattttattactctgtatctaaaatagttatcatactccattttaaaacaagttggaacataaaaataaaagtaggatggatcatgagatgataagtgttttgtcagattaacattttattttacaaatagctaaataacttaaaagccttttctttccttaagtttgagttctaaatcatggtggcgcttggaagggaaagctgcacctgtggtagaggagtgtgtggcagaaatctgtttacacagctgtgtagtgatgtcagctacacagaggacattcacagagtcatggaatgagtctcacttccacacagctgtcagctctgccttggaaatcactaattaaaggataacttcagagtttgactacatcatactcctcagctcactagctgtcctctgtctgaatgcataagttcagtcataagtatatgttggccagtttctgagagaatttgggctcttggttaagactgcttcatatttgtggtttatgctttcattgcatctattaccagctgtgtttgtaccaaactgtacatccattaaactttattgcagttacatgggcacttttggtgcactttactaaagttacagaattgaattaatttggcctgtgtgaaagcttcctttatcattaataaatttcatgtaatccatgttttggatagattgtatgattcataccactactagaatataaataaatactttaaaactaagcattagtaacaatacagactgagaatttattcacaggactttaggggtttagaaaagtatctgattcgaaaaagtgaataaaatgttgccactgcctgtgtgtcaccatcacatctcttcaaaaatgcttacctgaaagagttaacggactgcaggtgctttcactgtttgttggacacttgtgtgtgtcttgaactctgctcaactccacagacaccaggacacaagggtcacatcctgcccacacatgctctcttttctttgttcctggagagaatattaagcagcaacttgtagttaccagcagttgctttctagactcgccagcatctgatagagcagatctgcacagcataaataattggtggcatctttgttagacccttaaccctggaatactctgcaatggatgctgcatttgaaaagggccctaaagagaagtagattcactgtgtgtctgtttctacactgggcaaagtcacatcagggttgtttttgggtggggggctccttatttttcttgtttaaacaatttaatttccaagttgggtgcagaatcacgaagtgtttgcagtcatgtgagtttaattttgtgtttttacagcatgtagcatggaaatgttacccactgagccctctcccaaatcacaaaatatgctgttttgtacagttggtatctgctgtaaagattactaagctatgtagcttaaggagagcccagagctcaccaggtaggctagctggccagcaagccccagggatcctcctgtctctgcttccccagagtggggtgagggtgtgtgtgtgctatggtgctcactgactgaactctttccctaatcctgaaattcattattttgtgtaattaataatgctgtaataaagcataaaatttttgcagtttaaggagacaggaaatgccagttaccctgatttgatccttataaattaatgcatgtatcacgtaatacttcataaatatgtataagtatgtcaattaaaaattaatgagaactaagagagccttcaagtagcaggaaaacaaatagcttgctatgaaatcaaagtgtccttctaactgtgatttattctttggctatattagacagcagaagaaaaaaaaaagattacagtatattcgtacacttcactaaacttttgttgaacttattttgttatttgaggttcccgtccccaaacatccccatagaaaatcagcagtgacagggatgtgaactctggtctgggtgttggcatgtgagaagcatggtcctatgcagtggtgaggtctggggtttggaggtagtgtgcatgactgtctgcctccctacctgtctgtctgcctgctgcctgctgcctgtctgtctgcctccctgcctgtctgtctgcctccctacctgtctgtctgcctgtctgcttccctacctgtctgtctgcctgctgcctgctgcctgtctgtctgcctccctgcctgcctgcctgcctccctgcctgccttttacagcaggaaggatgaaacagagagaacctgcaccacagatagctttgattgtgcttcaaagtcttggaatgtagaaaagcagtgaccggaaccaagtacattagttttctcccccatgaggagccatctcacagtatgttctagtactgggtagttaactgtactctttaaatgctttcctacaaatggttagaagtgaaatgaagctattaatgagttagctctgttttcattgatagccagatcatatcaagtatgcgcttaagtatgtcaacagccggtggagatgtgctgttagatcacattctagatgtggcttttcagtgaacttgaaagacgttgattcgtggcgtttggattgtttttccactttcccttttctctcaaagaggtcacgttgttagtggtaagcgttcagtaaaggtaattaaaggacataagagttagctgaggatatagtcaactgtagagaatttgtccaacgcccacaaaaccctctgctgatcccagcatggaagagggaagggaaggatccttgggagaacttttctaaaatttgagattgaaacgctcctcacgttttgtttgatgcagcacagatccaagtggtgataatttgttttattcccgaatttgtacttgagagtgagagtgctttagtttttcaagtacatactaaacaaatagagtgggtaaggtctgtgtacacagcccttgtgactcttccccaagcttatttaagctttcttagcaggtaagccagcggcaatcactaaaccactcatgttgttaaaatatcttcttcccctacttaatagttgtctttattagtaggaccaagatacatattttcagaagaaacttttgaaaattaaaaactttcagtcagacttgtgccaatgctcaattgaacttttcaacttccagaatccagaaataaacatatattactgtatgcagatgtaattaccttcaaaacatgtaccacagggcgttaattttatgctttgaagttaagatcagaaaaaagccttcctacgagctgtgtaggctattattagtggcccctttgctttctctaggacagctcagagttctgtgctctcagaatcgggatgacaaggacactgggaccttccctcctctctcagtctgctcgttccttcctctacgtcacttgctctctcaaaagggtgtgggcaggctgactagatggctcagtgggtgatggtacttatgaccaagccttatgacctgaactcagtctccaagtcccacgtggtgaaggagggaacagatttctgcaagttgtcctctgacccctccaatgtgcatgccatacacataataaataaataaataaatataacaaaaatgtataacacaaaaaggaaaaagcacagtcgcttcaaatctagaaatgtaatgagaagccctgtaaaactcagggattttttttttgttttgttttgtggtcttggctgtcctggttcttactatagaccaggctggcctcaaactcacagagatccacctgcctctttctcctgagtgctggaattaaaggtgtgtgccactgacgcattcagtttttaacagtctcaagagacaatcactaagagcatcctgctgacctccaaagttaaaattctttgattaaagtagaaggcatgctttaattttatataagaataaggattattttagaagtttgtggcaattgtacttctccatataaaggttctgagcttgaatcttggtgctggtttgactacttgaaaagctagtaggatgtggatgtgaattccaagacatcactcttggcaaagcagggagcgagcatcacattgcctaatgtccgcagggatgggtgagggagtgcataatgtcccttcactgagggagggagatgtgcggatgcatgagtgactccagtgaagacggaggttctgtcccgcctggtcccatagcctctttgccccaaataaactgttagccgatggcaagggctccttattggctagctctgtcttaaatattaacccatatctattaatctaagtattttcacatggtcatacacagaaggacctcccccatcagggtctcacttttttatataaactcgtcttgaattcctggactcaagtgaccctactatgtcattctcattggtaactgagagactaggccatcaccagatccatctctatcttggtgttcttcaggtggctctgctgaactgactgaagatggcacccttaaagatactagggcctttttattgtccaggactcaaggctacttcctaatatatcctgtctatataagcatttgctttcagccaggcccccactggaagtctaacaacactgccttactggggtattttgtgtgtctttatatttcatagtctttaattctgatataatatccttactcctttctcatttattatttccttatttcttatctttttatagccatctcacagaattttatctcatataaacaaatttctgaagcaagactgagtatggctttcacaattttgaactgtttgaacttctgaaatgttaatgcatggcttttcaacatctaaagtagcttcctccgcattcatgaaatacctgactccagtgtcttcagtctcagagtctggctggtttcaggttctttccttcccacaccagagaatgtgatggatccatgtgatgtgtctgtgctagtctttagcaatggagacacatgtttctagtcagataacagtttcttataatgtctaatgcttagaaaattaaattgcatatttttttatttcatgctgtaaagaaggcaagtgtaactttccccataaatacctaaattctgacttagggaagatttcagtttgccagatataatcccatactgagccccctgctttcatttacactcggtagaacgtggtaacaaaatacaactgcaaccctaaagagaatgctctaattagattgaagctaagatacattgttctgcattttagcagatttcctgtcaggagcttctattgtaaaagtaaagtatcacattttgaaatcctatatgcaaaccagaaatattttggaagcttcccaaagctgttaatatcatgctttgtttttaaatccttacacatctcaagattgtattcttaggtcatctgcttgcactcttgttatttcgtaaagcctgaaatgctttggcctattttttttttttaatacaaaactttcaaatctgaggcttctctcctctgaaatttaacactgagtttttcatgacaggaaagctctccttgcagacaaatgtggagcctgcagtaaactggtcttgcattcactttcacatttaaaaaggcaggtattgctggttttttcctttggtgttttaagaaaagctggcattgaattgtatgtacagtggaagacgaccttgtacttctgatcctcctaccatctctcaagtgcttaggtttttttgtttgtttgtttgttttttgttttgttttggtttggtttggtttttttgctttttgagatagggtttctctgtggctttggaggctgtcctggagctagctcttgtaggccaggctggtctctgcctgcctctgcctctgcctcccgagtgctgggattaaaggcatgcttggggtttttaataatttcctttggctaagttaaaggagactagaattgcagtggagtctcccaatctaagactttttcttccccgagacccacagatgcctgtgccttctctgctaaagtacatattccagtttttgatctctttaaatgtttgatagcttactggttaatattaagtgaacttcattcttgatgatcaaaatatttcttgtattgttgataagatgcatatgattttctaatcataatcaaatcaaacagaatatataagataaaacccaagtttcctctcttgtccatttccatgacgctttgtcactacagtaaaaatgcaatatatgtaatagtaacacattgtgacatgtgacttgtttagtcaacacttgttaagtgtaaatatttaacctggcacatagtataatgtgctttatactatacagaggcctagtggtaatagaccctttgtctttaaatgtagagtaagaaggcagaagagagatataaatggccccaattaaaaaatgtttaaaattgccatatgataagtggtgtaatagagctcttagggtcatgtgactgatagtaggatgtcaggatttctgtttcaggcaatcagagaaggctttatggaagacatggttgggcatgtgctttttagagaaggggttgtgggaagaaattggaactgtaattaaatggcattgcccgtagaaggcatagtataagtacagagagaatgtgtacagacttgctcagtgaaaagcaagttccactctgtgacccaactcagcatccctcatgctggggattgaatctggggcttccggcatgccaggcaaacacactcactatcaccaagccacaccttcagcacaaggaggaaagcaaaatgtgttttggaggtcatctgactaggagtgagaaaggacctcaatattggatcttgtattccagctaaaatgactgaacttctatgcgtctgggtaggggagccattagcatttattttctgtgtgagggcaacttgatgagatctgtctcttcagctggtggacatagaaagcctgtgtcgcataggttggaaaaagtataaactatacattaatcacatctattagggaagattcagctgaggttgctgcagggtgggattgacggaatgggtgacagtggctagtgtggaaatcaaaaacgtcgtagctgctcaaaggtcagattgactcccactatacctcagggtgcagcatagagctagcagtccataaatagctatcaaagtggaatcttggggtttaaatgactgagagagtagatctgaaaactctgggctggagagatggttcagcgcagaggactagggttcaaatcccagcatttccgtggcggctcataactgtaatctcagcttcaggggatataaccttcttgtctggcctctgtggacagaccacatggcgcatacacctatactcttaaagtaaaatttgtataaaaagaatagaaaaactcaaaaagtctttgatgctgacaatttttgttttagattattgactttgaacagccagcaagacatgtaaatgaaatgtcttgcacaacagaagctgcaaaataaagcagcagaaattgggtgtgatgatagagacagaaatcgacagaaggagcagaagacaagctaggcactgctcaaggtttagagtaagacactccagagggtcaggcaaggacacgcccccagttgaggttgacaaggcagagaagattggaaactgagttagaagaaaagaggatgcccgaagggttggcaggtggagacgtgcagcagaactgaatattgaaaaaggactagtgagtctcactgggaagcagcagttgcgtcagtgtggggagaggagggaagagggaggaggcctgggttgggttaagcagctcaaggacaggaacaggtcagctaaggagccctaggaccaggaggccagagaagggagttcttaggtgggagaaagctccacggttcttgtgagtgaaggagctgagaagaagaaagaacgaagatgcacttgagggggaagaaagaggcaaagccatgtgccctggagctagagcgaggctgcagtcttgagtgtgcttggtgggagttgtgtctgcactctccagttcagcagctgagtcggggtggatgctgagcacccaagtggtgctgaggcacttgagcattcaagttctcatttctttatgtctaaattaattattataataataataattattattattattgggttttttttgagacagggtttctctgtggctttggaggctgtcctggaactagcttttgtagaccagtccaggctggcctcaaactcacagaaatccgcctacctctgcctcccgagtgctgggattaaaggagcataccaccactgcccggcctaaattaattttaaatgaaatagtccatgtggcacgtggcaacctttgaggttacccaaaataacatagttttgttaggaaagagggtcagacactgcaagtgatagggacaagttctagaagacatttgaggaagaggcataaaagggtggaagaaactcagaatccatgtttccttttcttatttgaaaatagacagctgggctgagtgttggtggtgcacgcctttaatcccagcactcgggaggcagaggcaggcagatctcgtgagtttgaggcctgtctggtctccagagcaagtgccaggataggctccaaagctacacagagaaaccctgtcttgaaaaaccaaaaaaaaaaaaaaaaaaaaagaaaaagacaaaagaaaagaaaatagacagccggttccaggaggcagcatggagggcttacaatatccctgtggatttcagtgggtaatctggcagatgggagggaacagcactgcagagagacacctagacatgatggtgagctttaggtggcctccctttctggaagctattttcattaaggttaggggaggtgtttgtagtgtgccccttgagtaaatctttgctaagcaagtgaggatggccaggggcatggtggattggagctgggggccctgagaggagaagggggaagagcacattccccggctgtcaggctgcaggagataaagccacagttttcatctgtgagaattacagatctggagataggatttccaacaggaaatgggataaggagattaacagatgacagttgtcagataagaggagcacagaggattgatgcacagtttccaagtgcacagggcccctgactatattgctagcttacctttactctgcctttgttcccaacccaccaacataatttgggatataaccttaaatggtaagactgggtttattttatctttttgtagtggcctccagatttgtcaaaactgaattcagaacctgtgagatcatctttcctaacatttaaattttgtagatagagaatgtatcatctgggttgtgagctcagagatctgagcctgggtttctaggtctttactgcctgcctgcctgactcctgaactgtggggtaacttgagtaaccatggcttctgatctccatctttagtaggtatctaatgatttgtatgccagaaacactaaaacacagcatggagtactgtctgtagctttactggggtttcttttctgaatttatatttgcaaattaccaagcaactgatgtgaccattctgaaaagacaccttgctggaacattgctctgttgtctctgagcttattcgtgcattgccaccatgacattcagcaataaggaaagcactggtgctaagtatcgtagtacaaagcctgcactctggtctggcttcagctgggaaggagtttgtcaatgagcagctttatttcactttaaacagtaccaagtgtgttccttctgccaccctgccccttaaaccctcttctgtcctcctctggacttcacaaagaagaaagatacccaaattatacaataaaaagtaaaaccctttcagagagcattagaacttcataaggctcttagcatttcctgtttttgttctggataatatgtagaaacctgctgaaggggttgaaattaatcatatttgtttggtttttataaaatagtactatgtgtgtgtgtgtgtgtgtgtgtgtgtgagagagagagagagagagagagagagagagagagacagagagacagagagacagagagacagagagacagagagaattctaataatactttcttttgcctgttgtacacacaccctgcatttgaaaagaggtcagacagaagccagcagctgctgcaaatgcaaacgaagatatacaggtttgggagcttgagaggtggatactctaatactttagggagtttcttgaagccatgtatggaatcagctctaaagtatttccatttcttgcaaggagaagcacaaagaaatgggattagtcattttaaaaagctaaaccaaagtattgtgcaggtgagcaaagagtgttaaaataccttcttttaaattagttaatatagttttcttgaggatttttagctgtcacagtatttggagtatatcagactttgatgttcaggactgtggtggtttaaataagtatggctcacataaactcgtgtgtttgaaggcttggcccatagggagtggcactattaagagacgtagccttgttggaggaagtgtgtcacggagggggcgggctttgaggtcctatatgctcaagctacgcccagtgcagcacacagtctcctgctgcctgcagataagatgtagaactctcagctccttctccagcaccgtgtttgcccgcatgctgccatgctcccagccgtaataatgggctgaacctctacaactataagccagcccagttaaatgttttcctttgtaagagttgccatggtcattcttcacagcaaaagaagccctaaccaagacaggggctaatatttttactcaactaaatgcttccttccttcctctccttgactttgcccctactccaccccccaggttgactgccttttacgtaaatttaggagttgtagaggtgaaaagttatcttaagggtcctaggtattgtcttcttaaaatatgggtctgatgaccagccgaaacttctagataaccaagttttctagcctacctccaaccctgatgtctgcctaagaccttcgacatcagagtccatgtgacatttcccattaacctgtgtatccacagccctctgaggaattctgatggacactcaagttgagagccactggctttatggcaagaattttataccttccttagttttttattgagacataattaacttacccaggatttcactgtttgagtgtctggttgagttgatcttcactacattgtacagctgtgtagttctgaaacatttcattcctcagaaggaaactccacacctataagcagacagtcccactgctagctccaaaccccagttcggggtgaccactagttcacttttgtctctgtggtttgctgttctggatgctttctatcaggacagtcatggaatatgtggccttttgtttctgcctttcacttagtgaggttttcaaggttgactcaggctgctgtgtgcccttctctgtttttatagctgggttgtattgtactggaaagatacatgggtaacatgtttatccattacttgtttgatagacatgcaggttgttgtttctcttatttatttatttatttatttatttatttgtgctgtgagtacttatgtccacattttgcaagaacttgttttcagttctcttaggtacatagaatccgttatcatctgtgaatgttaagcccagaaagtcactggaagcaagtgagctgtgaatcatctcattcatgattgtagtcctgcaagtgagcccatgttaacaacattctcaccagacaatcagtagaaacctggctttgtggagatagctccctgatgtgtattgctagttccctaatgttaacacgcacgtctaacagcagtgtaactatgcgtttatttcacacatacattttttttctctgatttctgtgtcccaggcaactcttcagcagtgcccttaaaacagcaaggtcacaaacagaaagcacaaacactgtgaaaaatgtggcattcagtgagttgccagagacagacctgtttgatctcccccgggacatgtgtaccagcaagtcagatttcccaccgttgcaatggcatggttcagtagttgtgaaagtaccgccaggattatttggagggctataagtaagttatatctaacagagtatgaacccaggaataatgtatttgatgctaggcaccaagtgcacctggcagtggagttgctggatcaagggatggctctgattttaggggttcctgaggctgtcagcagcagcatgggggcattctggcttctctgctcttgaggatgtttggaattcttctttctttgagaatatgaaataatatccatttctttgtggtctttatttttaccccctgaaatcactaatgcatattagttacttgaacgtcttgagagatagataccttttcaaaaccttggcctcttctaaagtggattgtctttttatggatgacttctggtttttgtttttaaacatgtatctggatggtagactcttaagtatataatttgagaatatttccccatgctgtatatatgtattactttcttgagcatgttctttgatgtatgaaacatctcctttgctcatgctttggaaacttgaatatctattcttcatgtaattaactaatcagaatgtcccagcagaaaactgttcacacatttctattattaaagacatgaagagtagagtttatggtttcaatagattgtcacttgctttctaaaaggctatcatttataaatatatggtatttgtttgtagggacttataaagatttatatagaactttacactgacatccttaggcccatctgtttataaaaagcaatgttaaatccatttagacaatggctacttttttgtttgggaaaattgaagcagaaaaacaaaacaaaacaaaaaaaacaagcaaaaaaacaaccaaccaaccaaagaaaccacctatcactactttggctattacttccttcttaaaaaactaaaacaaaaagaagaagactctgcctcacaaaactgtgacctttctactttgaaagcagggtctctagagccatttgtgaaagaacacaagctcacaaatgtggaaataaacagttattgttgtttatttgtgttagtttagatgtagtagccaatgtgtcagaaactgagtctgtagttcttaaactaggctgagcaagcaaacagcatcagccttcctcttctaagtaactcgaaatccagaagatcaaaggacattataaccaaaaacagccctggttgcaatttccttgtagaagcaggaaaaggctagaaattacatgtcaccttcatatcctggctggttgacctcggttctcagatcaagtccctctgtatgccagctgttgccattattaagactttgccccaaggggttaaataggagaaaaactcgagtgtcctatcccagagcaaacacagaagtcccagccccttacatgcccattcaaagcactctgagtgtgcctgtcactcactcctcctgctcggctcctgagtgctcctgctttctgttgtgcccagttctgcgagttctgcagcctggccggtcctgccgccagatcagactgaacccaggagtttcttcttttaacagaaggtaacgtctttatttctgcttctctaggtgggtgtttgttgttttaaaggaatttctttttaaactgttcctattttttaaggctgtattttacaatccaattactgcttttcagtgtaatttctgaatagtgttttaacacttaaaaatttttgcaacatccatttgagtttgtagcatggtacagtagaagaaggtctgctattcctaagtttattaaaatctgctttctttgtggagttggaaggaaacctaagatttaaagtggagtatattgtttcataccttcagagtttcatttaatctctgcatgaatggggggggggtgttgaaaatgtgctcctaccataagcagttgataaaaatataggtaaagaatcatagcaataattttgctcacatcttacaattaagtattttttaaaagcaataaattagtcttctacctatgaagagagcccactaggagccaagcgtcaacagcaggttcagttttgccccagatcatttcaaatgttcagcccagtgtactcctccaagctgcatctgagctgattaaatgttgtgccttgtgtgtgcttttattgtaccagtgatgactgcattaggactggatttactgctttacgtcctgttagcagcaaaatgggtttttctgtattgactttgtttaaactgagagtggataatttatatgtaactggcaagagaaaaaagaaaaaaaagttcaaactagtcttaattcgtcaagtatgtttctgtgtggtaacaaaatctggcatctctcactccggtttcgggtgagctggaatgcctttcagcaggggcagtacaaggcttgcagagcaggattcataatttgctaagagctttctttaaccaagaagtacccatgtggacataagaatgaaatatactcctttacccatagaggaggattctagatcccaacgcttgtagatgggagctccagttcactgctggctgggccggcactagaccagaagtaagctctggactggggcagggtgtgggtagaggtgggagcgctaggggtgctctctgcttctgtggctttaattcccagtggctccttctgctttttagtatgctaaaatagttatcttgtttaatagttctttagttttgcctctctaattgcttctctaataggatattttttactgtcaaatactgaatattaggatacttacagaattatacttcatttggagtatcttgtgctttattgtatcttatgttatacacctgaaattaggaattgtgagcataaattacttgtagtgattatagagaatatgaaatttctgaaatgattgctctacagtgcagtttaagaaacacatgttaaccttgtctcagcttgagagacgatctgtttaagactgactcctttgtcttcagagcttatattgcaccagctacccctttagataactcttgagaaaactccttttctatggttgttactccaagttcttctccttctgtctttatgactgtgagtcctgggactgcatgtgagctttctcacggtatgacccttaaaacacaaatgtgcatggtgttcagcctggacacacactgtcatacattgaacatttcctacctttaaaacattgcaattattgatcatacccccaatacaggagataaaattgagataagatcaagacagtgatatggaatgaatatatactttttagttgatatatatatatatatatatatatatatatatatatatccacatctattatatagcacatatatggtagctttgagaaatagagtggaatgttgccttcacatttttattatctcattttagttactattaaataggatcatttaatgctggcatttgtatttaagttataagagaacttacaaggagcacaataggtgctcctcatataggtcactaaatagggttatttacccatttaactgaaaaatatgggttaattacttttgcaagcaaacaagaatcccaggtcaacagtaaatgctgtttctgttcatctgatacacatacaggaaaaaaaaaaagcatgtatcagaattcaggagcattgtagtgataatttaagtaaaaaatagaaaaataactatgagaactataccctgacttcactaaacgtagatatactactgaaattgaagaaagaaaagcctttgcaagtccagtgctttctaaatgtaaacacttccagagtcttttcataagacgattcccttatcagggttgcagacaaatatttgagtgatgcttccctagttgctcaataaactaaaagattcccccttaagacatttttgccagactgcagagaaggactcatttgggaagcttccctggacacttgatttgctagtgctcaaagttcagagatcagcagggggtgggggtttgggacagacggcatttgtagggacattaattctcagtaaacatgccaccatttaaatcaagtagttctaatgctttcttttgaacaagcccagtctttgacagaatgagagaagtttctttttaaatcttcacatcctttagtgtggtgataaatgaaaggaagagtttcttcttgtcttacctcagtgaagggtgtttactccaggctggtaagttctgaggggttgggtctatagtatgtggagtgttaagcatcatgtcatccgatgtctacagatgagcctgtggcccgctctctgttagtcggctcagtgacgtgatccagcatggcaagggaaagctggagtccagaaggtaggttgtcttgttgcgagttgaattttcttgaagaaagagtgtgttcccgtgaccttaagacaaagactgtttatttccataacactttgtcattcttgtttggtggggctgtcaagctgggaggcagccttgtcatctgtaggctgtgtgactggagctttagaaatgtaagataagtgcaaccagaattgtttccccttttcttggtgtgaacttcagggaacacgctcttctgttggaggagctggagacctcactttagaaactgaccagtgattataaatatgcttttcttgagggttaaataaactcattagtcaaattagctatttcctaaactgccttcagaagacccacaagtcactgagactgtgtgacagtttgtttcaggtttttgtgcattgtacaaaggaattctgcagttgtctctcatttatactgttgtcttaataaggtttctgtgctgtctttgcctctacccttacagtgcaagaactgccaccaaggaaacaggtggagatgtgtttgcatttcctgaaatattttctaaatgttgagtatttcgagtgacagttggatcctcttaaaactgatgaacattaattttataaactatgaattgctgccttggctgcacattagaatctctcaggagctttaaaaaaaatcaccgatggccatactatcacaatatgaatgaaattagaattgctggccaaaggtccgttttgtaattaaaaaggtatacatcgctgaagtgattccaatgtgtagccaggtggagactggtgtgacacgcatgtggttttgcaaatgtgtgttgtatccattgcatttcccttaagacctgtgatctaatgtgtgccttggttggggtgggagttggggaaccacctcattgtttgacatttctgagttgggatgcttctttggctttagttcatataaatttggttataaggattaacacagtactccagatttagagttaaaaaacaattcagctttgtggaatttaactctgaattgcaaagataatgagtctcatgtctctcacgatgcttacttacaatgtgagtttgagacatggatgctatgtggtgtgatcatttctgtggctctccaggtactcctttcataattgcaatatgaatggagctcttgaagtgtgtaggtagggggataggtgttcatgctaaatgaaatgacagttagcatcctttgtcccaaattgtaagcaagaaatctcatgtttacacccctatctctcctgcacagacctgataccaaaggaaaataggcaaaaaacaattgaaaacaataggattggtgtttctgtaagcctgaatttcctttttaacttctcactgcatgcataaactcatgtcttggtaactggtacatctctagctaaccaaatatggtcgttccccgccccccccatttgctctactacatttattttcttcctaagttttttttgttttgttttggttttttttgtttttgtttttgttttgttttttttgttgttttttttttttgcttttatcatggtctgttgtaaatgtgggcaaagtctctccatttttcttctatatcattaagtttttataaatactaccagtagtcttgtataaagatatgtaccatttatgatttctcctctttgatgtctttatcaatatatattacatatataatcatattcaaagaagttatataatggtaaaaacacttatttttatttcactttcaaagatggtagtggttattatgtaatttgaaactacctagttgataacacaaatttagtagtcagacagcaagttctcatgaaaagagttctccttaaagagctctcgcacctaagtcagtttgcctgctcataatgtgggcgagcaccctgctgccagagaggctgggatgatgggatgtctgtggcataggttgtgggactggatcaaaagcgtggcttccaatttgctgcagtttctgcttatggggaataatagcaacagtacttttgtatggttcttggcaacctgtaaaatgtttttaagtgcttaggtggagatatttataaatattcttactgaaagagagtttagtggcagaaagcttatgaactcaaaaaaaaaaagaagttaatttgactcagaaggtaagaagacacttgggtataagaccggcttgctcaggtcagtcctattattttgaaattatctgagtagtggctgaggataaggatggcttgttttttatttgtttctggttagtgatgtagtagtgactggacaacactgctaacttagtgagctgtctctgatactcttgaaagttgaattgtaacctgttaaacctgggaaatactgaatttagaggcttttttgtgtgggtgtttatgtcagaagtctctggtggactggttgaccttggtgcttcctgggagtcatcttgaggtagtggaaagccttgccttcagagtctttgtgtgggattgaatccagccatgtgatttggatgagccttccatgttgttggcactgttgatcagtattctctctgatgggttaagctgtacttactttatgaggacagcactcctagagacaaagtctggctgatgtccttctaacccttccctagctcagcagggccatgcagaggatgcctggcacacacacattgtttctcatggtgtttagagaagccatgggcttctgctgcagtactaaatactgagaagccagcgtgctaccggtgatgagaactgaggccgtcattttagagtgaggtcaatcagtgtccaagaatcacttcctactgaaacagggcttataaataatagatacaaatacttcccaaattgcctttagtcctttgtgaatggaaaaacttgaagtcctcttgtgtacccatcttctctttggagaaaaagaggcaatataattcattccttatgtatagggggttttgtttgtttgtttgtttgtttgtttggttggttggttggttggtttttcaagacaggatttctctgtgtagctttggagcctatcctggcactctctctctggagaccagaggctggcctggaactcacagtgatccacctgcctctgcctctcgagtgcagggattaaaggcgtgcgccaccaacacccggcttctgtataggttttatcaaagagattcagattctgccaaattttatgaaaattaggcacagcccaatttaggaggattgatataagccataattaaactcaataattaattagaacttaagttaaaatgtggttctttccctgccctagttagaaaaagggtttgttttcttcttcagcccttgtgttcagcctccttgcattgtgcatcttcttgccattgcttaggcctagttctcttgctgccttgaagccttgttggaggttttcctcttccttggaggaatgcgtgccaaggactagcagcacagacatgttgctggcggcttggtgctccctcagggtagatggctcagaacctgtcttttaaccacatccccagcagacccctaaatttggaggcactgggccaacattggacattttcatctcgtgaatgtgctctagggaggacaactcgcctgaaagcagaactggctacaaaatggaatgcagttttaaccatttcactttagtgctgtgagtccagagaggtgctgttactccaacatgtcatctgagtgtcgagaaggtagaaagctcttaaccctgccatcagtcttcctagtttcaccacttattgatgtgtaactcagggcaccttacttagtctctgtatcaagttttgttttgcaaaacagagtaggttatgccttccacatctgttttcctggaggctattagtgggatcagctggagtgagatgagccttgggaaatgccagagaggtgcactcttatgctgtcgatggcagggaagacactgctcctccaggtatgaggcccgtgtgtgtgtgtgtgtgtgtgtgtgtgtgtgtgtgtgtgtgtgtgtgtgtgtgtgtgtgtgtgtgtgtgtagagagtagtgatggcttcacttagtgattactgtggtaattggatcagtctgtgtagcctcttcaacagtacacttagattttaactttgcagttttctggatggcttagaaattgtgatttccaggtccaagcaggggctgcatggttgttcatgtactttagctgcctctgtgctcctgaagccattgtacagtcccattgcattctttaagtgaattgtgttattagtatagtttggtgtatattgtatttgtagtacattttataactcagacagattgtatcatgagtttgtaataagattttcaattatgtgctcttttttgtcttaaagtgtgactctttgtattttatagcatgtattttaagtacacaaactggtgatcctgtatacacacacacacacacacacacacacacacacacacacacacacacacacacactttattttaaccacatagactgttttctggcaattctcgagcttcacatacgaaagctctcaccactgagctacagcccctgacctcaaccagattgactcttaacagtagagttttctgcagatagctttgtctacacataatagtgcctactgacttcttcccatctgttacatccagattcaaatcactgtgttttttattttatttcatttttttagttttgctttgtgttctgtttttttttttttttgtttgtttgtttgtttttccctgggttttttgagacagggtttctctgtggctttggaggctgtcctggaactagctcttgtagaccaggctggtctcaaactcacagtgatccacctgcctctgcctcctgagttctgggattaaaggcatgtgccactaccacatggcatctgtgtggtctttctttctttctttctttctttctttctttctttctttctttctttctttcttccttccttccttccttccttccttccttccttccttccttcctttcttccctccttccttcctccctccctctttccttccatccctcccctctctttctttctttcaataggatctggttatgtagctcgggttgagtcagactcaccattctcttggctcagcacctccaaacttaccatcatgccaggctgactcattctttcccgttatatgtaatacctaacaagatatggcagaaattaagttctctgttgattgtaatttaagttgcttgcctttttcaccttcaaagtgttgtagcccagaccttagtgatatgcatattattcttatatatctgaagttttaccctagtagaattgtgggctgataatatttcaaattttaataagtagtgcccgttgctgcctcagaagggcatattgcatttcaaacaaatttaagaatgaagcaagactttgatacagggagacttaggtaatttgatctatcttctcggttagtgcctggtaaaatcaacttgaaaactcagacttacctatgctatttgttttcagttacacatttctcagtttccatcttaaaatacaattttgcctggtggtggtggtggcacacactgttaatcccagcactcgagaggcagagacaggaggatctctgtgaatttgaggccagcctggtctacagagtgagttccaggacagtcaagactgttacacaaagaaaccctgtctcaacaaacaaacagaaaacacaacttgggttttaaaacttggaaacaccatttcacatcttttcatacttatgtcacccagtacatgaccagtgcttagggaaaagctgaagtgaggtgagatccgtggcttttaatggactgatattggcatatcagattgctgctgagtgggaaggacactaagtgtgtgaccagggcccgtcaggtttgagtgctgagaaagctttctttagatgtgctgtcaagagaatgtgctggcttgaacatcaccgtctctgtaagttattctttgtgttaaactcaacactgatcttaaactccttgcatttataaccacaaccattacacttagtacaggatttgtcacatttgacaatggttaatgttttcttccagaatgcccttctgcatcactaattactgtacgtattctctgctttgtatgctttgctgttagttgccctccatctagggtcagagcagtttttttttttttttttcctccatttgtctggtctctctcagcatgggctttagtgtcagcttctaacttcagattgaggctttgctagtttggtcatctgaacccctataccaatacagctgttgagcctaaatagtcattggtatttctcaaaacagttgtttcatttttgctttgtctgtgttttatttccttatgaatccaatttgttgtttccattttatggttacgactaaaaaaactgaaacagagaagacgcatgccagaagtctgaattctcacattctcaccattctgtactacctactagtgtctgcttcattacaagcaatctcccagattacaaaaaagttgcttttatcacgggggtgggggggtgttaattggtaaaattaagtgcctcttttggcatatacaaacatttttaactcacagaacagcagatggtgtattacagtaagagtaaatgagggtgattgctgtgattcgggttataaaaaaaataaacattttccccctaaagacaaggatgtttaattagaagaaagaaaactagatggaaatcagagaatctagggacaattgtagggtactctggagggtgttataagttggtgtcaagctgtcttgggccctgtccactttagaaatgtttactgtagaattgcttgtttctagatgcttctaaacacaacccacccaatagctgtgctggtagataataggatcaactattcagtaggatcaattgcattaaacatgaaaatatagaccatttcagatgctatctcgacagctggtgtagttaaccaccctgcaaaccagaggtgccttgccatcctcccgtgtatctgccactcagctcagcagatattttttgttagaatgactcttcaaccctggatgtcagcatgcttaccgcctagggccaggtgggagctggaaaagtgtaggcttctagtgagtgttcctataagatcctaactagtgactgctccctacagcacagttacacttgctaaatctcagttaacttttttttaaaggctaagctttttgaaatgttcttcatgtttactggtttgggagcacccctatacaacccatctttctattaacagtgtgaggctgtgttcttcctgagcaggagcgtcagtggaaatcagtgagatggaagggtgtccttggtggtggctgattgcttagctctggccagtcaccttagtctgtacctgtcttgctttctatgattgagataacacactgaattcacactgcttaaagctggggtgttatttgagtgcttagactggatgcttttatcccagagtgattttatgaaagagaaagctacttcatataccataattcaaaatttctctcaacagcctttggaaaaggaagttgggagcttgaaaagtaatggcaagaccttttagacattttgagtttatgtgtacaaggtttaaaatactttatttttctaccaaaacaatttgtaaagacaattttaatgtataattaatttcttattttgtgttgtttatttagctgagtttatgcatatgtgtgagagagtttttatctgaaagataaatattacactaattatgttgaatttgcatcagacctaagggcagtggggaaagagcctatctaagggaagatatccaaagcaagaccaatcggaaaggagagggcatcagggaatgtgaagatcctggaagccaatgaagagttcaaccagagcacagtgggagctttgagctctnnnnnnnnnnnnnnnnnnnnnnnnnnnnnnnnnnnnnnnnnnnnnnnnnnnnnnnnnnnnnnnnnnnnnnnnnnnnnnnnnnnnnnnnnnnnnnnnnnnnnnnnnnnnnnnnnnnnnnnnnnnnnnnnnnnnnnnnnnnnnnnnnnnnnnnnnnnnnnnnnnnnnnnnnnnnnnnnnnnnnnnnnnnnnnnnnnnnnnnnnnnnnnnnnnnnnnnnnnnnnnnnnnnnnnnnnnnnnnnnnacacatatacactcacacactcacacatacacattcacacacacatacacacaaatacacacactcacacacacacacatacacacacactcacacacacactcaatacacatacacacacacatgaacacatacacaaacacacacactcacacacacatgcacacacataccctcacacacatacacatacacacactcacatacacatacacatacacatacacaatacacacacacactcacatatacacaaacatacacattcacacacatacacaaacacacacactcacatacacatacacaaacacacactcacactcacacacacatacccactcacacaaacacaaacacactcacacactcacatatacatacacacacacactcacatacacaaacacactcacacacaaccacactcacacacacaaccatactcacacacacacacaaccacactcacatacacacactcacacaaccacaaacacacacacacacacacacacacacacacacacacacacacacttttttaagtaaagatgcccacttcttttgtgttgaagtttgttcaatatttacttttctaaaatggtcttcagctagctgggatggcatgtctacaatctcaccacttttggaggctgagacaaaaggttcagagttcaaagccaacatgagttatacatcactcccctctttcaaaataaccaataaaataaaagtattctgtaaaaaaaaaaaaattgcatcagagttgttgagatcctctggtaccagtatccagatggggactttgtgcattaccctggcaggttttgctcagaacagcccctgctgagctgatggggtgggtgacagtgggacaggactcttgcatctgagtgatccaggtcacaggggtgcacacacagacagaaaagaggtcactcttcttgacacttggaagtgtccggggtggagagggactggagggcgatggcactaaaagccacatcaaaggcttagggatctaaaggggtccatgtgtagggtagatactgtatcagtgggtttccattactagtcttactgtaagtccccatattttgtttccatctatattgctcacaatggactaggtggttcaggttgctgggggtggggtgtcagattgtcaagttttgctgttgcatgtttactagacatacatgttcctggtcctgtgagcatgtgagggacttctgtatattgaaggccagggcccttcagtagaagggggaaaacacctgatttaatgtgaaacaaatccatctacagcatgttttttcttgtgcaaatgttacttactgtttacatcatagaaaataaattcatgaacaacttctatggtatgcctaaaggaaaaacccctttattcttgttagtttgtgttgtaagaattttcagctcactaatctttatttcaatagtcttgttcctactctggaattcgagtgacttagaaaaaaaaatgttaaattgttgagattttttttttctattttaacacatatgcttacttgccttcagggctgctctttgtttgtccatcactcctaaatgagtagttggagggtagtggaggtgtcatcttctctcctttgggaagaaaggcagcaagcactgagaggagaggtggagtggagaaagcagccagtggggacagaggaagacacagtagaggcgggctctgtggtggctgtccccttacagactgctcatgactgctggaggagccctcatttcccacgagcagtgtttacatgtcttcaatgcctcccttatctatatattttccgaactggatggctttatatctctatcatttctagggccgagagattggagcatggctgtgatcagtggaagtgactctgtgcttctgagcaatggcagcatctcaaccagcactaccaacccctgtcccctcacccccagtgacggagaccagctcacacccagagaagccccgagaacaaaagcaagttcaaatggatgcctgcagcttaatggcacagttaagtcatcctttctgcctttagaccaccaaagagcacctcagacgccagctcagtgctgccaaccttgtccataccatccccctgtgaccagccatagcagtcaccaagagggccatccccagcctggccctgcagcctcctccgctttggcctcgtgttgcatgcagccacattccgaatactctgcatctctatgtccaaaccattcacctgtctaccaggctgcacactgccttcagccctcaccatccttctgccttcatcacccgtggcctgaccatttccaacatcaaccggcacagcagcacctggccatcctcaggtgagtgtgcattgaactaaccccacgtgagggtgacagcttctgctcattcctccaaaagaaggagagaaaaagaaaaatggtcaggaaataaaacccatacaaacacatattatgtggattgtgtgaagcccactaaaaaaattgaaataatgtacttgtgttatccattgactctgtgtgtgtgtgtgtgtgtgtgtgtgtgtgtgtgtgtgtgtgtgtggtgtgcatatgtggatgtgatgggggctttttttttaaattttgttactatgcacaagagatgtatttgtagtgaaattacccaaataggggcctccttattgaactactggtagtgggcaacctgtatgaaaaagaagttaatgctgcttgtttccttatgattctgtgcacctgtgctcacagtttctatccatagggtttgagtgattatgtggtacactgacttaagagagaagtgacgtccttccatagagagaagtgacatccttccatagcagacagagtgatatgtggtacactgacttccgagagaagtgatgtccttccgtagcagatagagcctataagtctgcagcatgggattttaagacttctccagatctgtagtctgaaagtagtataagaattgccatcactatcaatctttccttctccatgccccagccccttttcttttcagaagtacttgtcatatgaaagttaagtcatagtcactgcaggtaagcagtgatggcatgtcctgtagagtgtgcgcgcgtgcacgcacgcacgcacgcacgcacgcacccccccacacacacactcacacacactcacacacacatacactcacactcacacacacacactcacacatacacgcatgcacacacacacacacatacactcacacacacacacatacactcacacacacactcacgcatgcacacacacacactcacacacacatacacgcatgcgcgcgcacacacacacacacacacacacacacacacacacacacacacacacacacgagcttaaggtgcactttgatcagtttgtcaaaggcattctagtgtcattgtgtacatctcagtatcatgtgcaacctttctgtcactccagacaacttccttgtccccgctggccctagcctcgaactgcagtacataccatggccattctgttgacctgttcctggacacacagtcacactgcatttattcttttgtgtctgacaagttttgctcagcctaacatagtgcacatgcagcaggcgctcttgtcagttaagagcaatgtccagtatggagagagagttcacctttgtcaggttttgcaaattgtggggattggctactctcagtcttttagggaggagaggacagagacgtgagaaaagggcagagagcatggggagggggagaggggtctctgaagaatgcttctttgggctctgagtatatttttatattagatttgagagagtctttgttctagaagtgtgcagaattccccaaagccagcctttgttgatttgtcctaacagctctgggctgcgtgatcaggtttggactcttcccatgttgaattaagctctgtaactagtggattctaaaattatatactcataagtatgtatatgattaagtcatcaattatatatatggttgtagagtgtgaggtgagacggctagttatgcttactgcagctctggaagctgaactccatacagtaagtcttaaagcattaaaaatctgggcaaataaccagttcttccaatgcgccagattgtgccaagattttctggatttgacttagcatttgttcatgacctaatttgaaagtaatgagagtcccatgtgtactttaaatggaatggtattaaactcaagtggatggcaagtggctgagcttgccattgctcatggttgacactggggatcctacaaccctggtgaccttcctgcagatggtgtaggacactgggttccctgcggattgtcctttagatcttaactaggtagagtgatgcaaagctttcctgacagaagatgctgtacacactgcttcaagaatgattccacagctcctgcatttatttccatgcacactcagcaatatgtatttgatactcataagtgcccacaccaaaagtgtcattctaagcagattgaagtatcatttttgcctttatcaagcctttaaactactagagtcacttgtgtgtcatattttttccttttaaaaacattctcttaattttatgattcataaaattaagatcattggaaaagttatgtttagttttgttttgtaactctagctgtcctggaacttgctctgtagaccaggctggccttgaactcagagatctgtctgtctctgcctcccaagttctgggattaaaggcatgcaccaccactgcccagatcaaaagttacatttggtgtattctgttttaatatcatttgtcactgaatataaagtagcttaaagacactgttttaaagcttcatactttttcacttgtcagttctgatcctcacagccaatgttcaaccagtatttagcctgattagtcatagacaaagtctgtgccagcccattttaaccctggttcttcatctggtcactagggaagttcaaagtagagtaagtgaaagattatgaataagggaattttgcaatgaaaataaaggattctaggagtttgggtggtgcgactcaatgagatgaatgagctttacttaggcctggctgtgaatgggacttgcatgtcccttgaagaatggctaggaattaataagggggatgaggaaaaagggcatggagggtggttataaaataagagtgaaatcatattgatctgggcagagtagagcatatacctgtctgcaatcccagaactctgaaggctgaggtggaaggaccttaagtttaaggtttaaatctattttttaatttaagaaatgtatttaagaaggggtagaaaagagaacttagggaaagagtcatttgaaatggtcttgaggcatttcttaattttacacctccaatgcaatccagctgtgtgaaggactgtgcagtaatgatctctgtcatcagaggctgaggtgcctcgcaggacagtcatgttccacctaagctgttgaaacactttccagttattcacttgggatcttactgccatattaaatggaaagggctgtaatattactgtacagataataaggagttttgtatccaaaaatagcagccaacagttctaatgtcaatcacgtatcttttaatttggtgttgcagacaagggttgttgtttgtaatagcactccatacctgaacactggtgactcattatcatttgacctgtatttgggggcacccaccaagtacatttttgtttctttgaagttgctgttacagatagttactgttgggtgttctgtgtagcacactgggaaaattaagagctatgcaaagttagcagtacttgccatgggggggggaccctagagccctggcattagcccctaaaagttaactatgcattactgccaccatgtacttgcaacagcaccagttttgacccctgttcagtttctggtttgccagtctctgacaaaccagagtctgggaggctttatttccattctcccataagagattagtttcggtgtacaaaggaccttttttttttttctaaaaagtaaggcatgcgaattcatgtgttatatgaacagataagtgccaccctgtaatgcacgttcttttgaataaaatatattgtaacatctcaaggcaccattacagctctggcctggtctgcagtgcccgccctctcctctgtccttagccctggtgacactgctgttcaatttagcgagaaatgagcagaagttgttctgtgctctttatcaatgtgggcactgacacagacctagcatcttggctttgccctaccattcaaagtcaacccagacatttttctgagatgctaagtgtttactgttcagtgctggacacacatgagagctgtaagcctggttctagtcttcagaggtgggagggtggtgtacactggttaagatgcttagatcccagcatgggctaaccatgagtaggttgttgttgtcctcctgaatatttgttatatatttggagcacagaagttaagcaacagtgttattacagaggtataagtcaggctaatatgatatggaaacttgtgcaaattcatatccccccccttttttttttgtaccagtaaaaagatactatccatgacagttacctgtcctcatctcttgaaatagactatggcatctgtaggattcccgggcaggtaacttttaccagaaaggataaagaccagtctttagaccttcatcattcacttagatccaataaaacttgaaatttgattcttcaggaacactagtgacattgtaaattttccatagccttatggcaagtggctttgctcaacagcacagatgctatcattagagagagtcttattggaccaggctgcctttcttggctctataaaggagctgagatcgtttttcccattgtagcagcaaatggaacttatatgatatagaattaacagttctctctgtctctgtctctgtctgtctctgtctctctctctgtctctctctctctgtctctctctgtctctctctctctctctgtgtgtgtgtgtgtgagagagagagagagagacagagacagagacagacagagagagagagagacagacagacagacagacagacagacacgtggagccaggagtcacatcatatgaaagtcctcctaggttgctttccacattatttgttttgagacagtctcagagctcagcagccagcacacaccagcactgggatcacagcagcacccaccacacctggcttctcacatgtgtgacagagattgaactcaggtccccatgcttgtgcagcaagtgatttaccagctgaatcatctccctggcataaagatagttatatttgagattgatggcctctttttgtcaactttgactggagttttagtggttgcatttttaagtgtgtaacaaagaagtgataaataataacaatgtccttccaaatctcaaggaccaaatccctaggttaggaaaacctgtgtagcaggtagataatatccttcacaatctggaggtaacagatcccataaaagccactgcacgtctttgcagttgctctgaaaccaagtgtcagctcacatcgttcatagtcgccagggctctttaataggatctgaggaaaagcatggtggtctggggtagacaggtactgcttgctgaccattgagacagttggtgctacctgatggtagttccctttctcagcccctttgctacactgtgtgaggggagaaagcctgggtttcggaagagacagtgtatttgaagcctgcctgttgcctgctagttctgtggtcttagcaaatatttaatttctctgccttagtttccagtcctgcgaaggtaggagtaacagctgagttaaacttgtatggagcctagcacaggatttcaacctctcctctcgtttctaattttgttctgtccacatccttgttctgttgctgctctttgttgtctgtgcttccttctattggtagtgtttcaggaacacagcacactgcagcctgatttaaataaagacatgggtaccctatttccttcttaagtataaagtgcacattttctccatccacgtggaaaagagggacactagtctgcttttgagaaaaaggctcctcagcccagactcagagtctttctgccaattacataatattattatgatagctacagattatgtgagaagtctggtaaaacttcatcttgattttaccaaaaccagggtttatttttacattccttaacatagtcaagttaactgcttaaaagggataatgtttgtaatatgtaaaatgttccaagcttgcttgccaaagtcagttcgtttggcagccaggttgagccaaggcttattttattaggggagttcttttagagttctttatattataaatgagcatattttatagagtttttgccccatggaatgcattgcacagtgtgtaatgcatttcagaatatgagccttggtgagcctttaataataaatgttaagaaacatgatcagttttatttcataaaattaacatagctcttggaaatgcagcaaatatactcttttatttctttccatgttacttctagtttggtaggtaaagagagaagtggggtggcaggtatggcttaagttttctcagggttttttgaaaggttgtaagacacttggcaaatggtgaggcttactaaaaaggcattgctaaggatcagttacttcttggattccaagaaagagatagctgctgttgactgcaccttcttcccaagcttcaagtgttttgctagatggaattgaaagtaatttatagaatttaacatttacagaagaattttgattgctatcctggcactcttgtcagtaaaattaactgtacaaagttacatttttaacacaaaccagatattcaactgattgcttggtatttgggagtttgaagtatagctttgtgccacaggcatatttggagtgcaatacatatgtactgcatgaaagaataaaaagatttctcaagacatattttttaaactttgcaaacaaccccaaacttagaattttaaaaacacctcatggagttaaaatagtcaactgtgatcaaataacttatggtcttctataaaggaatgatttaggcaagaatcactcaatgacttcatggaacaaaataaggcttagagggttcttgatccctaaagaaggagatgagaccatgggagagtttggatgaagcatcacaggaaatgggaagggcttctcagacatggacaattgtggaggagacctgtaggaaccaagccaggacaggcttcagcttagtggtttcctttgtgtggatgtatgccagctgtagtgtctgtcacagggtgttcatgacattcaactctggaaaaccatctacaatagctagtccaagaataccactcccctgacacagtgggttcacagtgttgtacggtcatcattacagcatagatttattgctgactgctttgtctgcagtaactatttctaatacttgtggttgatgttgttcaacattctttaaaacatttttgtactattttgtttcttcaggacctagcatggtgcctggcatttgatacacattcagaaatcaattgttgaaagagctaaatagataactgggtgccaatcaagctctttttgcagagtctcagtgatatggcatgatgctttggtactgagaattaggccctgctagtctatcacatatgatgagatgtgtccctggtaatgagagaaaatgtgaagaccttacctatctttgagaatatgttctgtcctttaaagctcctcatcccaagtacactgtttctgactttggaaacagccaaccaggggatggagagatggctcagtgatccagagaacctcggctcaattcccagcacccacgtggtgtctcacaaccacctgtcattccagtgcaaaaggatcctacatcttcatgtgacctccaaaggcaccaagccacacacagtgcacagacatacatgtaagcaaaacaattgtgcacataaaaatgcaacattttaacaagtaaaaaataaagccaaacacagtctcattagtgaagagaagagaaatcaagggtagctgtgcagtccactgcttccagcttctagacgactttccactgcatttctgtgtctgagagagccagcctgagaacagatccctccagcaggggaatttccttacaggacagaagtttaatcagaaattggctgttgatgtccactgtcgtgcaagaagtgatatcttggttatagtgaatactaagtagtgtgggccccgaggcattggtgtagagctttggtttttgagcagtgatttcctagcaggttactagaagctgaaactgctacattatgaaggaggactcaggaaagatttatttaaatgtgccatctcttcatcacagggctcctctctaatggttagactccatgttgaactccagttgtattgctttttaccctgctgaaaattcccagtgagcaacattactgtctagtgagtgttctggcttgagatcgtagacttcattctgcattccacactctggttatttaagtttaacaaggccttgctggctttcttacagccttttctcgggcctcttactaatgatgattattcatgtcctattaagaaacctatattatgtgctcattaagcatgttttgcacagtattcacaacagcagtctggcagagacaggcttgggtttaaggtaagtacttcataatatagtgtaactttgcatgggttgtctgcttcataacctccaactaaaacaatgtcaaagctactgtctttaaaggttttttaattaatcagttgttccttttagaatgctgattgttttgaactagttctttccccttggtggtaaataggcattcctagagtctttttgggtgtgcattgcccaggatcagagccatgtggtgttttgatcatgctgccttccactggccctggggtaagaattgaatgtgtttgaagattaatactccatggcttgcttccctcacccttcagttaactgtagtagccacttttctgagatacactaggcctgagatttccttaaggagaaagattttgttactagtatgagaggaagctataccttaagcccccagttgttccactcccctgttttttgtatgctggattccttttttgttggttaaaatagccccattccttgcctgctccttgggaccaaactcaagtaatgagaggaaattttgtttgtttgtttgtttgagtgtgtgtgtgtgtgtatctcgagtacatatgtactccacaatggatgtggaggtcagaggacaacttgtggggtctgttctcttctaccttacgagtcctgaggatcaaacttgggctgtcagacttggcagaaagctcattattcacctgctgagccatctcaccaacccaaaagaaagtttcttttgaccccaagttgaactggagctgtcacatgcatctgacctgtacaagttttgggggaggagtgggaccatgtagatgaaccagtatcccgtgtcttatgcacaaacagcttttcttttggaacatcccttaacagtgccttcgtgggttaccaggcttggtttataattgacagctgtgaagcaaatcctgtaaacacagttttctctccatgtctccagcagatagacatcttggagtttcaggtgttaatctttggctgtgttgtcatgaggatctgatgttgatgtgctcactatatttttgcctcatttgttgtagccttttagcgcatcttcacagtaatattcttcatggctttagggagaaattacaaactaagtaaaagctaaattggaggtgagaacaccccaccccacaccccccagctaatcagtagtcattgagtgcttatgtgagctttaaagtcaacagatgtcaaagagaaaataaaataagcctggcagcaggacctgcttgctgatgtttatcgaggcctgcaaagccaccctcagacccttcagcaggaccatgcccttcatcttctcctgtgcatcggcacgttcctgtcagctgtaagggaatctaaagctgtatgtttaaagtgcagaccttgaccactgaggcacactcagaatctggggccagggagatattaaaagagatcagttcagtgttgtgttaattaagattttatgattatactcagtaaaaataattaacctgagccattttgtttgaaatcattatgtaaagaaaagcaaatttcattattataaattaccctaaagttaaattattgcagaatgtacttgagtgaagcattggaagtgtgtcatcaggctttcagagagggaagaggtgagcattttgaatgatgggtgtttgttactcacccacaggtacacacacaggtttcacttaaaaataacccgctttaaatcgagtcttcgttaagtgcacttggtcacagaagcttctgggagtacagcagccttgtgacttagactacataacattccaattgtcctacgggttcctttatttaatttgtgatttttgtaataaattggcctttctaataattttaataataaagtttgttaccaaaaatagtctaaaaatattccacagttatgtatagtgtgagtttaaaactcttaggagttatgacacaggacttggtcatgcattgcatttatgttcttggctaaacgattgagctttaatggcataaggttaccatataaaatatataatgatattactaatgacttcattggggccttactgcatccaggcatcacattatatttcatagttttgagaacaaaccaaggaatttgatcctattattgtcatctatgctttatagaagaaactgaggtctgaaaaaatgaatagtattttaaatattaattcaatagttaataagatgtagtagaacttgaaattgagttctggtctgtttgagtagaccccccccccatattagatacacttatctgaatcataaaattttggcataataaatatcatgattttaaaagacttggaatccttcctcctaatagcagttgtgtgtcatatacagagtagagagcttttgctgtaacatttttcagttccaatggtagtatgagattagttatcgcatccaactatggtgtgggcaccatacaggttcattcttgaggtcaccaaactgaaatcacactgattacaaagactgtagaataactgtgagcacacacagcatgcttaggccactctagtaccttttggatcatggaaacaggacactgacaataccacctcatatatggacccttagggagaagcctgcctgattctgcaccctgcatatctgtcacatgcatgttaggctcacacattattagttgatgtagggcacacagtgggcacacagttgagtgctggtggtaataagtgcaatttatatgtgggaggggaaattttattgttcatcagggatctaagacctatgccttgtaagtcatctcactgagaaaaggtggatgaaatctagcttcatagtcagatgttggaaatattactggatcattttactgtgttttcttaaatctatgcttagtgatctaaggtcctatttaaaattttatttttcccttaataaaagacagtctggtaagcaatcaaatctacagtgatcaaatattgcaagctgactctgtctggggacagaatgtgattattgattaggcagaggtacagggagcttctggatgctaaaatatcatggtgtgatcagtggctacctagatgtgtgcatatataaacatccatcacaccatacttgaattccatgcctttgtctgaatacttctgagctgtggggaaaggaccacgtgagggatctgagggagctccatctgcatcctaaggtttcttttcatgatgctggcctttcctgggacagtgggaaggcaaggactgtgctgtcttcactggagtcagacaggatgaagggtgatggggggaacaagggttcccttccagcctcctcctgaacctgctctcagtagcttctctgggaagaccggtcaacttttagttttcaacttactgcttgtattttccccgatttcaagatggtaaaagtgattgcattttgattttagactctcaaggggtgggggggtgtagttttgattgtagactctcacggggtgggggggtggggtgtagttttgattttaggctctcacggggtggggggtggggtgtagtttgtggcataagcacgttaatgcatttcttgcctcttgtccctacttagatctctgcgagcctcttctcatcttcctattttggtccttgagagtggaaattatatctcttgcttttttgtgctctgtaagtgcttagtgagttggaattttagggtggaggagagaagacagcaagactgatttaatactgctgagaaaatgaaaggctgtccttcggcagccctcctcagggaaggtggtcatatgtcttcccatcgatctgtctgagctgggaggagagaagtgcgccaagaccatagcaagatttaaactttccagatggaagggtcagacttagggtcgggaagaaggcatgggagggtgatttgaacatttatgacaaaagagagtcgtggagtccagactcctaagccctctttccctcatacctcatcctgtaacaagggtctgggaaaacttagtatgctcagttgactgggaattctgcatgagcttcctttgttggaaatggccattcaccaggaaagcatgtgggagttcctgcatgtcctgttagggaactgagcctataggcttttgaaagttcctcgggatccttgttctgggttgtgatttagcatgcacttgtagctgagagctgatgtccctgtgtctggctgatggcctgcttaatagtctctctctctctctctctctctctctctctctctctctctctctctctctctctcactctctctctctctctctctctgttttttgtttgtttgatgatttttgaaacagggttgctctctatatccttggttgtcctggcactcactctgtgaaccagactggcctcaaactcacagagatctgcctgcctctctgcctcccaaatgctgggattaaaggtgtgcaccaccaccactggctttaatagtctctgctggtctcatattattttctgaattaatttatctgaagtcattttcaaattataaatgtaagaataagtttgaaagggaattaggttttcctaaatgtagtctatcctgggatttccctattttgatgtcaaaatataacagtgttttcctgtgaatggaatggtagacagactgatggcctcactgggataggtgaaactgggcctagaatgtgtaaaacctcttcctaacttggtggcttctgacttctgtccagtcttagacacagagggatcaggctaaaattctttgcttctgacagatgaggaaatcatgagcaattccctttcaagagacagaaatagatcctcagatccccatcgtttcccacagctccttcaaatcaccaagtcaaggcttggtggctcctattaagatccggaagtcagcagcagggtcacacgcaccctcacggatgattaagcccaagtggaaaactgttactagatggcactagaccatagcctggaccagggaggttcagccatactctgacaattctgttgcctgggtccatgggtgtgccacaaaaaaatactattcttgaatgcttttgtggaaataggcttttgggttttactcttctcccttaacataaggcattactgaaggtaaacattgaaatatcgaaaactaattgggctggcctagatcttcaacaaatggaatggaaccccaaacttagatcaaaaatgactgtggaaatagtcataaaaattaaaataaaattataactactgaaaggactaaaatgaatgccagaaaaatcatgttaaaaagtgttaggcagcaagatagctcagtgggtagacacttgctgccgaacctgacagcctgggtttgagttcaatacccaggacccatgtggtagaagtggaaacttgaaacttgactcctgcaaacacacatggaaaagtatttgccagagctgtactatgtcatagcattaacttaagattcctttaaataaggaaactatgtataaattaagagataagtaatgtgattgaaatttcgtgattggtaataaactatggcaaatctaatacagctccttttcagaagaattgaagtccatgggaaagagtagcccagagtgctaccatgctgtgtctgtagtgtggccttagccctacacatgttcagcggctgtactagcaagggggggagccacgggtttttatctgtgtgagagtgtgggtgagtgtcctgttctcaggcttaagaaaacaaatgtatgtgttttataacagacaacagaatcggcatttaaaaaatacctttgaatgaaagcttttctcctcccttaaaaattcaagttcatattttcttttcacagttctggggactgaaccccaagcctgagcctcgcacatgctagaggcagcccataccttaccactggatcaaagttcatactttaaaatggacaaaacacttaatgaaaagcttaccaaaggtacacttttaaaattttaaaaaggaaaaggttatatatggtctgactttacatgggaaactcagaacaagtgctttggggatttaaaatagccctttcaacttcaaacactgagtttggctgttgtagtaaaatccacgtggtggcaagtcagttgattgtcaactgctcctcaccagtgtgcttagtatggcattatttctcatagtgtttctagctctggcaagtaccagcacagctgtattggggtcacttgttccccagtgtccacctgtgttaggggtcacttgctccccagtgtccacctgtgttaggggtcacttgctccccagtgtccacctgtgttaggggtcacttgctccccagtgtccacctgtgttaggggtcacttgctccccagtgtccacctgtgttaggggtcacttgctccccagtgtccacctgtgttaggggtcacttgctccccagtgtccacctgtgttaggggccacttgctccccagtgtccacctgtgttaggggtcacttgctccccagtgtccacctgtgttaggggtcacttgctccccagtgtccacctgtgttaggggtcacttgctccccagtgtccacctgtgttaggggtcacttgctccccagtgtccacctgtgttaggggtcacttgctccccagtgtccacctgtgttaggggtcacttgctccccagtgtccacctgtgttaggggccacttgctccccagtgtccacctgtgttaggggtcacttgctccccagtgtccacctgtgttaggggccacttgctccccagtgtccacctgtgttaggggtcacttgctccccagtgtccacctgtgttaggggtcacttgctccccagtgtccacctgtgttaggggtcacttgctccccagtatccacctgtgttaggggtcacttgctccccagtatccacctgtgttaggggtcacttgctccccagtgtccacctgtgttaggggtcacttgctccccagtgtccacctgtgttaggggtcacttgctccccagtgtccacctgtgttaggggtcacttgctccccagtgtccgagctcacctgaagttagcacctggtgactctgccctactcttctaccacagttttgtgcattgtttccccactaaaccgttttcccccatttcatctttagacacttaaacttttaagtctgaggggtttctgttgacatgtgcatgaaatgtttaacactggagtttgaatttggttggttctcagtttagcagcttttatcctcaccctgttgaaatacttcccaggagacagaagatacagtgatctgaattgtctaaaattccagagcagaatgtaatagaatttcacagcaggaaaggaccatggaaacagtttaatccaactctttgttttacagatgaggaaattggagccagagaggttaaagcccagttggaaacaggtcttctgacttctcattgtggtctttttattaaagacgtcatccttatactatgttcctaaatattgtgacatcattatttggctgctgctcgtatatacacaattggttttggagttgcacctgaagctgagcctggtggtactggcctaggatcccagcatttgtgaggcagaggcaggagggtcgagagctcaaggccagcctttactgcatagtgagtgaggccatactcagccaacatgagaccttgtcttggggagaaaaatacatgaatttagaattttaacaggctggaggtgcagtgcaactgagcatgtacatggtcctgagttcaatacccagcaccacaaaaatataaaatgaaacactgtttagcttggctgccctactggccaggttaccaaggacatggctgcagcttgaggacaagtgtctcagcacagagggggcttcctcatctataaaacactctcatttgtccccagtcagattctcttaagctcagttgatttttgtttcctgtgttaattagactcgaatggagaagagtttccttccagtcagtattatcttcactaaaactgtaaagagttttgttttgacctttatttaaataaagctcttaacagtcattgagttagttatggggggcaggggtaggcggggcatgaaacgtgctggcaagtgaacccagggccttgtacgtgtcgacaacagtgttctgtggctgagctataccgaaacccccacaaatttaagtttttagttaaaaatgtaaaatgtaagggaaaatcagtttcaccacttactgttcttagaagtggaactaaagagtttacgtggatgtttaggaacacagatttgcctcctcaccaagaaatgacaaaagaaaatgataatatggctgcaagggatcacttgcatgccataattccatgagacacagtgggcttcattatctccttctcccacagtctttttcgaattgcattcaagaaagattaataatactgagattttgtaatttttaccttgaatatagatgcactaaaaattaaacaaatgttagattataaactaactgaagaatctagtagttattctgtgtgtatggacgtttgcctacgtgtatgtatgtgcaccgtgatcgtgaaatgcagatgggagccagaagagggtgtcagattccctgttagaggtgggtggtggcctccaaaagagaagcaagtgctcttagccactgagctcatctctccagcccctttttatcttttgctccttaattaataaaggcctaggcttgctaataaaggaatctattttagattggatgtgaattgagcagttgattctaatgtacttaaacgaggcaggtatgtgctctcacagaggtgtgattaccatgcagagttttatctaagtcatgtgtagtttgtgatgaaaacctaacagcaggggttttacggatatgacccatacattttgaaagtagccatacttgtgtgtcttatcttaatgaagtgtatttgttgtgttcggcttaataaaaactacccaaacacgaaacgcccctcatcttccagactaagcttttagacaactcttcatctttttttttttttttctaagtcagattatcactgacttcacttgaggaggcacagcacatgttaaaatagctgtaggcatcttgattttactaaaaatgtaccattccgtacaaatatccagcaggtgaattggaaatgttacagtggttctaccgagtacagatctttgtttatcccaagtgttattcttttgtttaaaaagaagaaaagagaaatattgagacagacatattgactataagtttattataagggccggtagaatgggtagactaagaagaggaacagggtaatggctgaccgccatggccggtcgccatagagagacagagcggggaaacagagagacgaggggggagagagagagagtaaaggggcaggggcctatcttttaaaggggtcctctgcacctgtgtgcagacttctttcccatggaaccttgggctgaccagggtattgcctgagtggattccaccaggtaactggggcaggccagcataatgcctgaacctttcaccaagtaacccttttttcttataataccatacacacttagtacagccagtacttgtaatcttttttttatcattttttatttgaattagaaacaagattgtgttacatgacaatcccagttcccttctccctcccctaacacacccccacacccaaccaaaaccctgtctatcacaaatcctttcttctattcttcccctgactcagcctttctgctccctcatgacctctgcatccttcctcttcttccgttcagtacttgtaatcttgattcatggtttacaaaggattttcagaggcttccttgataattgagttacattcttatatgttttttggtcaccactttatatcaccttcactcactgaagtctttagtggttttcttctctaacttctcctgcctgggattaccagaacagtcctccacagcagctgtttctacctcaccagttcttgcttgggaagcctcagtggcttccgtttctgcccccacctttgtctcttgatccccaaattctagtctttgttcctcctccctgttggggttcttggtggctgtgtgtgtgctgctttgagagtgtccagtacacgcgctggccagcattcacttccttgacttgctccctgtctacctgttgagcccttcccagagcacctagttcaaattctacttcttacttcaagtcccaggagatgacttttggagtatgcaggcgggtgctctcctgcctcaggcacttaatttattgtatgccattaaattctgagcatttcttgtattggtctcttactgtgcttacctgcaggtcacattttcctggcagattgcctacagcagtggcacaagctctgactgtgtgagttgtgctccagatcacaggagggggaccagagtatttataataagttaataaacttagtcatgccagtgatttcaatgatgggaagagtacttggtgaagtttagtttaagtgtaataaatatttgacttaaatagaattaagtataggttttaaattcaatctattttaagttctttggaaacttcttattggggtattatgttgcttcttctcatctacatggtagtcttaaaaaaatgaaaagatacaaggtagaccccactcctgagtctcttcccatccctcctgtgtccctgtgataaacaagtgtactggcttggctcattccctttccaatttgcaaatgcatctgtattttatatgtggttcacataaccagcatgtgtattacgggaaacttagctctgtcttgcagccctttccatatcagcctctgtgtgtgtgtgtgtgtgtgtgtgtgtgtgtgtgtgtgtgtgtgtgtgtgtgtgtacacacgcgcatgcacgcctgcacactcattctgtacagtatctcaacatgggcacactaccatttgttttggcatccttgctaatgtattggcactcagcttactcttgatcccacacacacactcctcagtgagcatccctgcatactccctcttgtctactcgtggcagttgctggtgagaaaaaagccttcctgctcgccctgctgtccattttgaggtaacaagcaacaatgccccagcctacatctgtgtatagcctctctttcccacagttggatgtgggctgtagagctggctctcccactgactactatgtgtcctgagcccttttctccttccaatggatggctcttgaggttccttatagttccaaaggcttgtgggcatcatgtcctctcttccacagtgctgagaatcaatccaggctctgcgtgtgctcagcaggtgccctgacctgacactgagtcctgccgttagtccccacccatttttatattcagctactggccagtgtcattgaaacttgtaaagtaagccataggggttcacacaacctataagtgaggagctttttattgatttcttcatgagtgatctatattacttaaccattcccaaaagaacagtagtaatatgttttctgtcagataagtcaatgattttcagaaagctgtttctggtactagctcccaagccttgagtaatgcagggacttgctcatgacgtttagataaacccctacccctcccacataccttctggtttcactactctcttatacatagattcctcatatttaaaatatttgttgaacatatgctaaatttacttgaacatttatgaagtgcttggtgtttatcgggtgctccttaaatactaacctcccacagtctcacctcttggtctgttttgtgtagtagcccagcccccgttgttcagttatttctagatgtcaagatgggcagcactcccgaatctgcatctcttaagcattcaggaaatgcattacacacgcacttgtggttattgttatccttcaagtcacttgacacagctcataaacattcatctgtggtgcgtgaaaaatgccctggagcccaggcttagcttgtctccgggtatctgtttcatcttcagatgtagcctgtgtgccagtgatgattcatggaaatacttaacagtgaagaacagttctgttgtgttggaaatcttggaaagagtgcttatcaaagtgtgattcctcttttcaaagccattccttgccgagagtcctcttacacagacgccatggcgaggcgctgtcttaccgctgagacctaaagtgccgcttgaggcattttctggctttcatttggagactaccatagagctcagaagtacccaaagccatcttttctaggtttgatcttccacattccaggaggggctaattggaatgcacaaagctacactttggtaactgtgatggtaattctgcagttaccaggaagaccccagctggggcaagcttttctatccgtgtcttcactcctttgtcctacagtctcaccttctttccaaaaattatgagaagaaaagtcgagggaagcaggccaagagcctgtgtggcttcccatctgtccccaggctcctgtgaactttgctgcttctctgcttttcttttcccctcttagctacaccacagtgtgaaggtgtgttttaccattgcaactgctgtctttccttgggccttctccgaaggagtaaagctaaccctaaccaaagaacaggcagatgttgccgccgaaggctgttgtttatgggattggatggtttggctgtctggaagcagatgtgtgccttgaccatacaatgccgaagggtgaattagccccatgaagaggagactgcttgtgtatttgttttcactggttgttgattagcactggctactgaaattaaaatgaagaatcacttggcaggatttttattagcgggatgttaaaggcaaaggtgaaagctgtgacagacagaggaaacactagccatgtggcctctctccacagtgtcattcgagggtgctaaagaagcagccctgtaatcagacagctttctacctgcagtgtgggggagtgtgtctaacatctgctcgccatgcctcttaggacagaaacttcaaaagaatcgaatgtttccccaggagggggtatctttgtggtgacctcaatttttctttttcagctgatgttgacagtttctacatattgtagtctcggaaagagtctctacatttactcatttagagtaaaatgaagtctgcgctcaagcaaaaagaaccctccctgtggaagtaaaatggtcatagacccccaacgaacttctcagcttaaagacaaaatgtgacagccttgagtgggaggaaaggatgcatgtgtgttttacagcccaaatgtatgccataaaataccatttctctgcaaattcttactatgatgaagcccagaattgtagctctggggaccatttttttgtgtaaggatagcgacatctcttaacttgtggaatttcaagaggtcctgaggacatgtgtgactggaagactgagtaggagatgaaggcacggcgcgcagtggtttacatccctgcccagtgccttcctcactgtatgcaaaatagctcagcagtagcttcatccatggggctcctatggcttcgtctttaaatgtcagtgtgtagttgtgattttggtgacttagctctgtaaaagctgaagaaaaaaaatacatgcatgcacatatatgttactttaagtggatgtatatgtggtatgtgaattttacctcaatgctattatagtaaaaattagtatgtagttacatttgaaagtatgggttcatggactcgcccatggatttattaaaaagaaattaacatgcttcatgatttctctgggagtgaaagtttcacagcaagtatgccttgcctctgtgtttgcttctaagctctgccggggctagccgtgctgtttcctcatcccctgtgtacagctcctggccccagccctcccatgcactgagtggatggtctcatctcctccaaagacaccatttcctgcccagcacttgacacaagtgcttaacaaatctatgggtgctaggtggtcttgtctttgtaatcatcttctaattaaaagaatgttaacacactctgtttgtatgtaggcaatgaaataaagctgggttttttttttttttttaagaaaaagaaaattattaccttaggaaaagtagataaagacaactgttaccaagaaaaattaatattgaattaggcatggagaaagaaatataaaaagtttgggggaaaaccttcatagataatattacagtcagcattcccaggatatttacaaataccccaagtcctaatccagagaacagacagtgaccctctgtgtgtcttagaggaagagggtgacagctgagtacattacttaagtcactattccatggtcacagggtgtgtgtagcatgcttatttaaaaatatttttatttaaccatccaagtatgagttcctaaggctctgaatcatagaacccctactgtaggatcagagacacaaaccaaagtagcctagttctgacattgagtgtgtgtgtgtgtgtgtgtgtgtgtgtgtgagagagagagagagagagagagagagagagagagagatattaaatgtacctacattgttgtttgtgtccctagtttcctgctggttttgttcatagtggtactgactttacagcattgagtgtgaacagagtaataacatgtgcccacatactaagctaacaagtattgatttatatctacagagggaccatctgttatcctgagttatagaaatgagagtacagatatttcttccctaggcatgtagtctttgagagtttaaaagtaatctctacttactgagaaagcatgtgttaagtattcttagtaatgctgtgaatattgtcttattatagagcatacccttttgtgcttaataatatgtaatattgtcttattatagaacataagttccttctatattgttcttattaggaacagactttgagtcaacatcttcctaaagaaaagaaacttcttttcttatgtagagattaacacttaaagttcacagttgtccctctgggttcccttccttcatggttctacaaacccacaggcacatctcagacaacagcaaatcagccaccaaggagcttcagagaaagggctgcaaaaacaagactggaacagtggcaacacttgcagaagtataaatgtgggaggggagtatttgcaggtcccagtcctgacaaagaaccacatacaagtaatgactgctgagggaaggaaaattagcctctcccagtgcagagtcatccaccttgaaaaccaaatacatgctaacaacaaaaccagacttagcagtgtatatttatatatttgtgtgtgcgtgcgcgcgcgcacacacacacacacacacacacacacacacacacacacacacacaccaataataactagagaaaaagactctccatgtgagagtgggaggaagactggaggaggggaaggaatagggaaagctatgtaatttgagttcaaacaaaaacgtttttttcttaaagaagcttcagttctcctaacagctctgcttctgagaatgcaagtgtcagaaacctgagaagggctgggatggaatcagaacgcatgctcactaaggtccactcctggacctctggtctcagcagttgttcccccttcttgattgtggccattttaatagatttgtgaataaagcatgaaaagaagaacacatgtcttttatagaaacagattcacacagtgcattctacagtacagagaccatggagtttggggacctgtctgtcattttgctttgctgggaattagacaaatacattttaaagaaatttagtgacaaatggaaataagaaagaatacttttgctcctcaagaaatcccatagtaggctgtgaacggtgtgaaaggagtcaaagcttgggtggagaattggaggcagcattgcaggttattttctttccattgagagcagtgggttgcagtagatttccctttgggagcatctgaagctaggaaataagtcagcagctagtcacacggactgttattaatgaagtcactctcaaacttctgttctcatagtccctttacacaaatggaaaggggtttcgtttcatgtgtaatagctgaaatatactatattggtattaaacctgggaaaatataagttgtttaactcaataataataataatagccaggcagtggtggtgcacacctttaatcccaacattcagtaggcaaagacaggtgggtctctgtaagttcaaggtcagcctagtctacagagtgagttccagtgcagccagaactacacagagaaaccttgcttgaaaaataaataggtaaataaataaataaataaataaataaatgtaagctagccctggtaaagcaaacctgtaatcccagccactgaagtagtgagatatgaggatgtcatttgaggtgagcctgggctgcaaaatgaggccaatgcaagttcaaacaacttggtgagatcgtctcagaaatgttaacaagagcacctttaatgactgtgggaatactcgcttcatatgttcaatccccagtactgaaaatagctatatatagtaggtccattatatattgatattagcaatatttttatgcagaatgctttgacaatacagcttgtggtgtgtgttccctcttcttttcttgtgggtctctgatgcatggccatcagaacagaacaggattttgattgaaggcagtgtgttgaaggatatgaagaagcctatttgaaggatacgaagaaaatttgtccttccatagatacatatttggaccctaacagacctcatgaaagggtctcaggaactccctgtggtcttcaggccacactgtgaatcactgtgctttttttgagcagtaaaacatgaatactgggctgtgtttattcaccaaagatttatttaaaaggttgccatgggccagcaaatgggaaatgaatggatctgggagggctagagagttcagaagttgaggttgagtttggaatttctttagcaagcttaatgttgtgtatttgggtgggcagggtcccagtgatgtgagggagtacttacagacactggggaggtggtggtttccatacaagcccatcctcactaaagtgattgggaaggtaagtagaagagattgaaaactagagagtcagccggcatctcagaggaaacagaatatttctagcacaagaaggtattgatgacatgttgaggacgaacggaggctgctcagactggaagcttggggtgaggcctcgtgcagaaagaggggagtgaatctggtgagccgggatcctgctgtgactccatcaggaatcctcagaggtggcacctcttctcaaccactggagcatgtcctctcaaagtacaaaggccctgtagtcggggttcattttctccatgtgtgttggacatcccccaggccatctctcttaaccctcctgggagtcttcatggagtactaagtcaagcactggcgcgtgggtggggcctccttacattatacagcattgtaatcattattccttttcttttttcttttttcaggccatccagacctttcaagttcccaagaaggtagagtaattaagccgtcttgtttactcatcaacttctctgtagctcccattcctctgccttctctacactttcttctttctaccttcttcactcatattttatgaaggaaaatgacatttctgaagcccatatctataaaagggcttttcaaacttagcatatcttcttaccctttaaattctcttgggtctgcatttgtatttgtccagctattttgcattcttttctatttaagttggcttctctgtcctttttgttggcggagggggcagggtcacatgcacctccattatcttattgttgcataaccctgtctaccactctgccaaccagtgtgacttcaattaatggtcgtttatttgtaaaaaacaaaacaaaacactgtagctgtattaagataaaggtatttatttatgtggaatttttatttttcaatgatgtatatgtatgtatatgtgtctggggggtatatgcacatgagtgtgggtgcctgcgaaggccactgttgtcggatctgaagctagagctacaggaggttgtgagacacctggtgcaagtggtgggaacggggaatgtggcccttgcaaagccatgtatactataaactgccaaaccccagaaaactttagatagaattcttgaaaataaagcaaagacactgccctatgctcttacacagtgtggttctaggtacagggtcttcacacttacacttgaagtgacctgtgagattcagctgccacagaagctcaagtagaaaagaatccaacccttccagtgggagccttacaccgtccagagtaaaactcagcctcccaaggggagcactcaccatctagagtaaaactcagcctcccaaggggagcactcaccatctagagtaaaactcagcctcccaaggggagcactcaccatatagagtaaaactcagcctcccaaggggagcactcaccatatagagtaaaacagcctcccaaggggagcactcaccatctagagtgaaactcagcctcccaaggggagcactcaccatctagagtaaaactcagcctcccaaggggagcactcaccatatagagtaaaacagcctcccaaggggagcactcaccatctagagtaaaactcagcctcccaaggggagcactcactatctagagtataactcagcctctcagtgagggcattcactgtctagagcagtggttctcaacctgtgggtcacaagccctttggaggtgaacaacccttttacagaggtcacgtatcagataatcctgtatgtcagatatttacattataattcataacagtagcaaaattacagttatgaagtagcaatgaaataattttatggctgggggtcaccacggcatgaggaactgtattaaagggtcacagcattgggaaggttgagaacccctggtgtagagcaagactcagcctcccaaggggagttactcactgtctaaaataaagctctcattagcaaactctcctgtttgaaataacacttaagattttagtataaactaaatgtatgcattacattttaaccttcttgggtgttgtgatactaggaattgggtgcagggcccagcacatgttaaataagcactcgtgaactgagcagcttctgtattttaactgtttgggaatgggaggttctcttctgtgtgtgtggtatggaggctggggttcaatgtcacctcccttcctcggtgtctccccaccttagtttttgagataggacctctcactgaccccagaccttgctgtttcagccaggaagcagctcccaggacctgtctcagtctgcagtgcctggcttaacacagcacctaagatccaaactcagagctttatgcttgcacagcaacacccttatccactgagccagctccgcagcctgagttttgttgaagagcacagtttcatgaccgcatgcgtgcgtgcgtgcgtgcgtgtgtgtgtgtgtgtgtgtgtgtgtgtgtgtgtgtattcatcttataaaactgaaacattgtacaataactttgtgctctcttggcaaccactattctacttttttgtctctataaatttgaccactctaagtgtctcatttgaggagagtcatccagatgttgtccactgtgacagactcattcattctatttagcatcatgtcctccaggtcactcacattctagcacatgtcataagttccttccttttcaaggtctgatcatgttctgttatgctgtgtgtgactgccatactttatcttgttcatccacttttgccctttcctgagagagagagagagagagagagagagagagagagagagagagagagagaggaaaagatataaacatgccatagtaacagaaataatatcacttttctggaaataatgatcttttcagcagactaaaattttaacattttgaaagtatttgggttttcctctgttaccaaattgatttttttaaagaatcataatttcttttttttagcatatctacccataaatacaacttactcagaaaagcctttcctgattttccagttcccacctcacctggaaataatctcttctttttcattggccaagcatcagttctgcttctgtaggtatctgtgcctgtctgattttctgcacttagctataaattccttgagcacaggtctgtctgccaacctttgccttcccacaatgcctttcatctctctatttgatgtactgttagatggctttgtaacctcacacaaaagaaacagttgtttgtcctgtttttgtgtgtgaattttttgaatctgagttgttcttccattaggttaacaatcgatgccactagaaacatagtgaaatgcttgtccttaagggacaggaaaagttgggagaaatattgagggaagacaatgagctgggggagaaaggtttctttaggaagtaagagagaacacaaaatcttaaaatttgctccaatcagtaaggtggaaaccaagaccatttagttgatttggacagtgccaaagaatcaggagagtaaaggctgctagggttaaggtgtgggggttggtcagtttacaccctttcagggaagtttgtggagagagcagattctggagaggtcacaaagggtaagccaggagaacagcaaataattcactgtggaggtccctgtgatgtcagtgaccaccagttcaaacctgcccgtatatgatgctgcctgagcataaggtagttctgtaagacactcggttaacagagtgagcctggcaataaggctgagcctctgtaagtatgttcaagggacttcctgttgggtaccagtctagcacacaatgccatcctcaccagggagccagcctgcccactcacttggagttgtgatacatggaaacatttaagatgccctgttactaagaggatctgaggcagccgactgagagatggcttgaactctatacagtgctggctaggatagagctgcaggcagtctcctcagggagagcccccagcccccagcctttccagctcactccgtgcctgaccagatgttagagaggagggctgcactcaccgttgtgctgcgcttctgcccatacatgtcccagtgagagcaggtgggtgcgcgatacatatcagcccatatgcagggggacttgcgtaaaagggtcagtccttttaaaagttattctgatgcacatatggctcacttttaaagaaaagaatgtgcacacactttactgttggtcagaagtgaaatgttataggtgtgtctgtgtgtattttataggtcattttaaatttcctttactcctcccagttttataggtttttaaaattgtgatattataaccattgtctggatttcatatcacacatgaaacacttattttctttgtagtgcccatagctgggcctaggcagcacaagggacagaagtcctgcctgcagtttgtgccattcaggggaagcacttgtctgagtggccatgaactccacagcactgagcatactcaggatggcaatgctgaatagttgtgtctaggacatctgctgtgtgcagaaggagttgtgatatcaggttaaatgtgtgcggaggaatgcaccaaagaactcaccataaagcgtccacatggcgccggtgcacgtttgcagcttgtggcagggcatgaaatgaaaaccaaatgttttcaaagggaaggaaagcaattattgaaagagagttttagactttctgtgtatgtgtgcatagttctcgagaacacaaagcaaaaagtcattctggataaattaagctgcagatgaaaactaagcagcgcagggccactgtcctctattgataacatgtttgtaacaaggaacgacttctggttcattagaaagagcggatccctttacaatgtaatgactaaacgttaggtttggaaccattctcatgtcgtgggctggtattttaagggtctggtgtaaagtgctctttctaaagtgtagagtgatgaacagaatgtctcagaagtgctactcatacaaagggcattattgcttcaagaccagtgatttttctcactgtttggtggaataggaaagagagtggggaggatgtttatattgggcacatggccactcgggggacatttgaacagccacagggaactcattgggattcatatgttcccattatatcccattatataaaggcagttctttcttgcctaacaaaatattccttcaataaagtcttaaatccagaatttgcaatcaggcaaataatgttcaactcagtgtcctgtgctctatgtaattttgcagagaggaattaactattactggggctagaattttttttctttttgagacagggtctcactatggagctctggctgacctggaactcactatgtagactaaactggtcttgaactcacagagatccagctgccactgtctcccaagtgctggcattaaggtttgacaaaggtagctggagagatagctgtaactcttgtctttaggttgtaagctgcctttatcagctgagccatgtctccagccctaggaatttaaagtgtgaatttgaagaagaatttgtcgtttacttccccttgtgtctttagtttcacttgtgtttgaagagacaggtggaaacacagttaaacgccagacttagacccagattacctaaggctttatgatttgactaattccttagcatgtctgtgcctcaacttttccattagaatgattcagatgatggtccgtgtaaggtacacgagccactaacactgcagtgagtacaaactgttatttatgtcaagttactttaaaagaacaggcagtgggaattgccagggcaagctccttaaggcgtaactatattatggcttaattcttttattagtggcaatttgaaataaatatacccatagagtcagttctgtggaacttcaaaaccagcactctgcatgtggagattggaaggactatatagcagtatttccagacatggagagcccctggctttatttgtaattgctatcgtgttctcaaaggaatttctcatatacttaatttgaagtctcttccacatgaaccagaactaggcatcacagtagccaagtgaactgtaattgttgagaatttaatagtagtcacacactgggtgtttgggggtttcttctaaaaaagactggaacaactagaagcccccagacactgtatgacctttggaaaaaattcagtttcacaaggttctggcaggcacttggttcatacaagggagagtgaggatggcacagtccacactgaacagagtaaatgccctgcccttgtgaactcagtctactgatactcatcattagtttattttctaggaagaacgagagtggctctgggaagtatggtttgggatttcactacatgaacctgttcatagactttttccttttaaaggagccgatgaaaggtatagagaaagaaaataagtagagaaacaaaaagttctccaagacactacaagatggagccttttttttttttttatcttcttcttctttgtacctataaaatgtggcttttttcttcttcttcccagacatgcatacagatataaactgtcatttgtcacataaactacctatactgacccagtagcctgtggtcactaacctgctactttaccagaaaaacaaaagggcaatgatcttcacgtttccggcattgttgtgtagaaatacttgtagtcgtattggtaaatatctgtgctggcataaaatggggatctagcactgctcttgtgtgtagctttacctccacactgcttctcagaggtcctctctctgctcactctgtgccttgtagctacgcagccctgctagccgactggcctgtggtggtcctgggcatgtgcactctgctcatcgtggtctgcgccctggtgggagttctagtcccggagctgcccgacttctctgacccactgctggtaaggagacctggacctgtgccaagcctcgaacagtcatcctgaattaagtactgaaatgtatggtacattctgttagtggccctttcctcctttgtttctgagatggagtcttacacagtagctccttgaacttgtcgtcctcctgctttagcctcctgggtctgagccactacatccggctcctcatctctttacaaacctactgcagccaccagtaaccatgcagacctctttctgcaagtaacgatgttatcagctcagtatggtgttgcatgccttcagtcccagcacaaggcagaggcaggtggatccctgggagttggaggccagcctggtctacagaaggggtttcaggacagctaggtctgttacacagagaaaccctgtctcaaaaataacaacagaacaaaacaaaaaatcaaacagacgtattatctatgctctgaggtacggtcaaggaacttgctcaccttcaagtcaagctcaagatgcccccacttctctttccccatatttaatcaaggagcagcatagtgaataatgtgcatactctgaaagtattttcataaagagtttagtactgtgtgtctctccccacctcccagaagttaaaggcatttccatgtaccaggacctgttaagaacatgctcctctggggtggggtaatgagaaaaatgtgaccaaggataatgataaactcttggtaaaatactgtaacaatgtatagcataatttaatttgaccttaattttttacaaattagaattaagcacttattaaatacttgggcacaggtaagtttctgatatgcttttcccacttcctgagacatgtaactggagaaccaaatgactttgtcatagcaaagagatgatgattatccaaaaggcagtgtgtgtgttaacacaggtctcctctgcagttgagaggaatgcctgtgtttcctgttggagactctgcatcactttgatattgctttcctaagttattaacataactgtcattagtgggaaatggagtacactaatggaaacacgtaatattttatcttagggttttgaaccaagaggaactgcaataggccaaaggctggtcacgtggaataacatgatgaaaaatacaggatacaaagcaacattagcaaattatccttataagtatgcagaagagcaagccaaaaggtaatcacttactttacatgacttttaaatgaatccttcttattgcctaagcaaaaagactgttaaaacccaaggctccattctttgccatgaaatttaactggtcattgaaatgtcttggctctactatgatgaaggtgaggttttcttctttacgcatgaatgttgctcacatgaatccttccagcttagtgtcagatactaagtaggttggagccttagggttgcactgttagaatcagcctgtctccttgaaatagctagaactttatcaaagatgagattgtttttccctttcagccaccgggatgacagatggtctgacgatcatcatgacagagagagaagagaagtggactgggacttccagaaagacagctttttctgtgatgctccaagtgagtgagcatcgggatggaccaagtcctcagcagcttcccagggtggggcggggcggggtgggacgggacaagactgagtgagagcaaatcaacagctttcccccgttctgtagtcacagaaacgtcagctaagtaatatatcctcctagggtagtcggctaccagtctcaatttgcctgtgattaaaaagaaaggattctgttcagatttaaggaagagattaatattaatattaataagttttctaccttgtctaaactttcaagtcacatcaaatcctttttcctttttatttctgaatcaaataacaagtacatattttttattgaatcctaaaataatcagttttgtagctttgtttaaatgaaagcaaacatattaagagctctccacatgtcaggtgtggtgtcacatgcctatagactcagctactctgaggctgaggcaggagaatcactggagtccagaaattcttggctgtattatttaggtactactaactgtagtaccctatgctatttgggtgtccacactaagtttcccatcatatggtgacctcctagaaatgagggaccatgaggggtgaactggcccagatcagagagagccgtgctccatcacttcacagtggaaacagagaggtgaagagagtgccgaggtccggagcttgcaggcgtcagcctggctggaaaggacgtgttgcatggtgctgaggctagagccctggagcacctgaggctactgctgcttaaatacagcagaattgagccccagacgttgcaagaatccagatttcagtgtggaaccacggatctttaaatgttggcagccaactcactggagaaattcagtcacacgtaaagtcggctcgttccgtggcagctgccagggaggatgtgcaggaggtggtgaggaattgcaaatggcggctagatgttcagtgagcagagtggtgagaatgaggactgagggtgatggtttttgactaagcaagtattaataggaacattgttttgatttcaacttgctgaaagcccctcttcattgtatatttccctgcctcagtagataccagagggcccacttagatcttgctagctcagatagatgggagaggggatattcagattttataccaattctaggaagcaaaggaagtacaagttcaaacattttctgcctcttaaaacacagattagaaaaactgaattctaattatttctatgtttgggctgtttttgttttgtttccctctcaaagtattattataattgcttaatcagcacttgttaatgtcttactaagaacaacagcaaattcaggaagtaagtctactttgttgccagtagttcacgccaatagctgtctttgagtagtaagttctggcttgactaaagccctcctgggctcaatgggaatgaaatatttcttttcgaagggctggttttatactcaaactcagcctacataagacaatagctgtttggtgaacacaagtatatttgctaaggacagctgaatgatcatgaataaaaccatatgtgaaaatggtttgcccattgatttgttaatgcaattagacatttagataatgtaaaatttaatctcctttgttctctttgatacatattaaccctttttaataacctggacagacacagcctcacgaagcacctgccttccatctcattctcacagttatttgacatggatcttgtcaccatttgcaaatgaggaagtagtcccagaggagttagcagttgcttgcatgaggtcacacaggtgataagtggcagggcctgggtacagccagatctgatttaaagaccatgccccttcctgtacattgcacacctccttgttcaaacagctttgttaggctaacttcagattctttctctagactctggagtggaagagtagccctgagcacagccaggatatacagtgctcctgtggttctggctggcacagtgcctcagcactcaggtggcctcctgtgtgagtgtggtgattcagtcacccaccacctctcgtttgtagccagctgccagagaaactacccttatgatcctctttgacattctctagtgtggcattctaacatttctcatgccattaagagaacgaagagagaccttcagttaattttccttatcaaaggaaagaattccctgctgagaatgaattgtctgtgcagtttctcttgtttctgaattctgactcttactagataaatagctataaacatttttctttccctctcttcattctaccaggtgatggatattccagagtagtgtttgcttcagcaggaggggagacactgtggaatttacctgcaattaagtcaatgtgtgatgtggataattcccgggtatgtaagatacagctgaaatgtgtacagcataataaagttatgttatgggaacctctgctgctgccctggtgtctgctgatgaaaggcctgcaaggcttaccaccaaaagcaagccccaacaggcgggctttgctccccagatcccagcattgaagtgtccttgtgtttctccatctttaaaacatgctgccttctttaataaagatctctcttcctttgccgctcacactctctcaccacgatggccttctgttatctttctggaataatggtccagactgcccctttcttctcctactgtactctcttctctaatttagtctcactgttctgcatgttgccccctccagagtcagttgtcagcattgccgctatgcagttctatgcctgcctttctggcaatcagtgatctcagaggagaacttaggaagcagggggagggatatcaaaagacattaatacagtgtctgtctcagcggccccaccctccaatccagactgccccaggtctaaacgccttactgcttggaaagacacaaggattcaggacaggcctttcctctcagactcctccagagccacacagatgtcagctccagaacacatggagtcagtcacccctgggtgcggaagggttgacagtttgagcaggcacagactgctgtctgatgtcactaatggacctgtccaaggatgatagccaggctggaagggactcaggatgttcttagcataaccttaagatctaaaaccagaggttagtcccaaacccaagcacctgccctgttaagagctagccagataacctgattcccatcttgtgctctcagtggggcgtcagtgaaacacgtggtagaaaggacccgtaacgtcacccagagcagcagtatccttgagctgacgaattccttcagagaactagcagctcatagtccacctagtgagttggtcccagatgcattgagtatctcatgcccgaagtgcccctatgtgctttcgactttaaaattaactttctacataagaggtgccacatgtaatgaggaatacacagacagcttccaggtaaggtagaccacgatggccttctgttacctttctggaataaaggtcattctccaatgatcacaccattctccaataggaaaagctatttgacatctggggtgaagttacagtgattatggcatcagttttctgtccttgtcaccttccttgtctgcaagtgagctataaaaaggccggagttttctagtcagtggtcaggttttatttgccatatttcttccaccagctgctagatcctaccttacctggaagctgtctgtgcatttctcattacatgtggcatctcttatgtagaaagttaattttaaagtcgaaagcacataggggcacttcgtgcatgagatactcaatgcgaggtacttgttgtgagtggctgtggaccatggcttgggatcagcaccattcaccagatgagaaggtaggcttgggaagtgaagctgctggaatacttgtcttcaagctgggtgagaacgctgaatttggatgtctcttacccctcagtgttctgcctgcccttggttctcaggccttcccagagactccatgtgatcatagaatactcactgctttcattctaaacagtttgatgagccatatagtccccacaacagtatacgagctaagtaccattgtatagatgggaaactgggcacagagagtaagtagcaaatttgaacccagccaaatctgcctcaagagcatgcccctaccctctgcactgtgtgcttccatagtgaaaacttaccccaacctgtttttgtttgtttatttctgatgtatatgcaatttcctactcagatggcccttaaagagggccatcatagcctgggataagtatcagtttgatagcagtttattcttttaatgtgcactaaactctaagagttaaaaagccagtagcaacactgtgtcatggtagctttcaacaacgaaaacaaggtagtacttcctccatctgtatgtacatatcaaatgatcctggagaggtagcttacaaaaaagacacaactaaacaggaaaataaataggtgaaaaattatatgaaggagaaacaatggaagaaaaataaaagcaatgacgagagagcctaagaatgcatagcctgccatctgcccactgtgagctgcaagcttgtcagtaacttcccagcagccagtgttaacaatttcctttcagtggccaaagtcaccgatggggtaataaataaggagtggaaattagaaacccaacttttcctaatgctgaaaaagggaacatttcccctgtaccctctctcactctctctctgtgtgtgtgtgtgtgtgtgtgtgtgtgtgtgtgtgtgtgtgtgtgtgtgtgtgtgtgtatgagggggagggagggcgggaggaagggaggttggggtcaggtaaatcaaggatgtgaattcacatgtatgcatgcatgtggaaggcagaggataacctcaggtgtccttcctcagacaccagcagggtctcgcactggcctgggacttgctgagtagactagactatctggccagcacatccaaggatccatttattgtcatctcctcagcactgaaattttaagtacatgctaccatgcctggcttgattttttaacatgggttctggaaattgaattcaggtcctaatgctcacactttacagactgagccatctcccagcccctctgtcatactcttgataaaagaagtatgatgttgtgtccacagttactgtgtgtgtgtgtgtgtgtgtgtgtgtgtgtgtgtgtgtgtgtgtgtgtgtgtgtctcggtacacatatattggcacacgagtagaggttagaaaacagcttgcagaagtcagttctctcctttaccatgtgggtcctggaggttgaactcgggtcctcaagcctggccacaagcacctttacccactgagccatctcaccagcccagttcttaacaagagtgtttaccaagtgagaaagtgggggacagacccaaaacactcatccaaagagtatttggtgtgggcagttgcagaatcacagtaaatgaataaacaggcagtcgggaacctaaagatctacttcaataaaaatggttataattttagcttgttaaatgaatacgcttttataaaccagttgcaaatgtgattgttcttaaattcctgctatggaaaaaatgataaaatgtccattagacatattaggtgataacttgggtcaacagctcagctttgaaattactgcttagctttttccagtccccagttggagctgctttgggaatttgtgtgttctggtgttctgagtccttggcagcctttcctccccaccctcagtccttgttactgtgttaagcacttggttagtaacgcctctcaagctgatgggaccaacctaatgatccgaagcagaagctcttagctgtcagtgggttgaccctggtgaggagtgttgcactcagggaggccagatgtccccttgtcctctgctgtgacgaatctccagatcccactgaaattacatgccactgtgctcctccttcagagaactggggcttccagaaggagtggctctgtccacctgcccactgaggtgtccacttctcagcttctgtcacttccctgactctctctagtccttgtttctgtcctagaggacccactggctaacatgcactcataaccgggaaggtctctcagagcatcactccactggaaacactttacctgtattgtctctgcatgtgatagacgttggagctttgaggactccgattgaaaaggggatttgaaaattggtgtctgagactttgtcttactcgattagcttttgtggactgctggaatcccttagaagcttagaggaccccagaatatagtttctgagacttctttcaaggggcctttgccttcactctcctctaactcctgttggctttatgtgtgggtgggggcttagttaccaggtggagagtccaggagtcagatgagcctgctattgagggtttaatcttcctcttttttttcctttcttgtcttcttaaaatacctccaacttagccattagtttttaaagttaagtatcatttaaacactactggtctctcctttctctctctctcttctctttttaccccctattttaagtcaactccatccctgtgactatctgactagggaactatgcaaagacatgtcacagccacataagcagaatagcttcccaagactccccaggagtaagcagctagaattagaggcctgtgttcgtagtgagggatttgcttttgtaaactctattttattgtctataaactcctaaggatttggaattattcataaggatcccttttccaaaagtatgacaaaactacatctgccctctgcataaagagacacctacctgccagtctcttataatatgggattctgtctttatctcactcacaaataactagttactgccactgtgatgtgacactttcagacatgggcacttcctctgggggtccctgtatgtctatataatatcctacttgtcacattaagttctgatctttgatttctctgccactctgagagtaaattgagggcaaggactatggtgcttctcactctgggcaggcactcagagacgacagtattttgaatctacagatgggaacagaaggcctcactcgctgtgagtatgggcagtcttgagtgctgcagtccttcatcctgaagggatagttagagggtgcccatcatgatatctttctctgtgatcctatttcttaacctatatgaggccttaaaggcagtttttccaaatgtagccagcacagttgttccctgggggtaaactggcatttgtttttatagtagccagcaaagaagcagttgatatttataatgcccactttttaatctttggtcaaatatgcatattgaactcctcttattaggaaagggggttatgcaaggatacagtgccgtgccccggctttgctgggtatgtctgcagctgaatgtgtgcctcttccagctgggatccctggaattcctttgcaggctgaactgttaatgaacagtctgccatgaaaactggagacacgtgactttactagttcatttttctcaagttacgataaatgaatctttaaacctggaattatcctgttttataaaatggtaattatgtgttttcagaaataagctttaagatgaggtttttgtgaaagtgaaacttactctaatacatttccataataactctttgactcacttttctttactcccataaagaattattcaaaacaagtaattgtggttttttgttttgttttttctgtcttagtttggtttgttaagacagggtctcagtgtgtagaccaggctgttctggaactcaaagagatccccctgtctctgcctcccaagtgctgggattagaggtgcataccaccatgctcagccaaaaccgaataactttttattcgggaaaacttccaacgttagaatgaacctccatatgcagcagcagccacagcctccttgcacatccacacctctccccacacggtagtcccagtttaccaggcctgagggaataatctgtagcttgggtcttagataagagtctagcttctaaaatgattatgtcagcaaacttctttgtcttggaaagatattttaatgaacagttgacaaagcctattttaatcaaggtacaggctgtttgaaatcacagtagaaaaactccacgccctttctgaactttggagtattccccagaacaacctttggtaaataaagacgaggaaggcggtaagtgggccttctcagctgtggtcctgatcagaggtctctgctcaggcctggaagggggctggtccctggtctcacctgcagggaagaagagtggctcatctaacctaggagtggaattaagccaacctcatatccgaagtggtagtagttccctgtggcaagaccagtcctcccagggacagcactctaaatgaaacgctgtccacaccaacccagagtcaccacagttcctaagtgcaccagccaccatttaccaacagagaaagcaccccacaaagggttttagccaacctgaatgaacttgaggatgtagaggaactagaattccacttgtttatttttattaacttaaacttatttaaattcagatgtaaaaatgttttaatcttaaaatattggcccttctcagaaattatttcagagaatgatttcagtctaagtttttcatgaatccggccactttttgatttatcaaatagagtttttctctagtctgcttagactgcagtaacaaggccccttagattagataacttattaacaggtagtttgtttctaacagttctaaaaactggaaaggtttaagatcaaagggtctgcagatggagtccagtgaacctgtcttctagggtggtatcatctttgtatgacgatacagcaccaaaaggcacagactcgtgtgagccaccacaagggcacgaatccactgatacctcccagaaggctctgcctgtgggagtagtcacactggaatcagattgtaaggtgtgaatttggaggacctattacagccataggagtacttttaggaacagcatctctgccttcaactgtgtttattgagaatttggtgactggtcaccaaaactttcttgccaagaaccagaattttaaggaaaacagcaattagacagctgttagcctcctccagtgagtgcatgaacttgaaaacacatccacttcatgactcacacagtgactttgaaaagctgtttgctaagcaggtgttaattttatctcccttcttaagccaaacccagtactgcctgacatggcattatatttgtataccattcccaaaccggagtttgctgttgaaaatcaaacagcctgtagactagctgtgacgtgaggtcttggggcagagagtgctcacctgtgtacacaactgacacacactatgacagaggacagtctagcttctgcgccttccttgtccctagaggcaggagtgaactgccggtgcgagcctgtttaaacgccagtccctctgcgttgtctgtctctgcagatccgatcccacgcccagttcagcgacctgtgccagaggaccactgctgtctcctgctgtcccagctggactctggggaattacatcgccatcctgaataacagatcatcctgtcagaaaattgttgagcgagatgtctcccacacgctgaagctgcttcgaacctgtgccaagcactaccagaacggcaccctggggcccgactgctgggacaaggcagccagaagaaaggaccagctcaagtgcaccaatgtgccacgcaagtgtaccaaatacaacgccgtgtaccagattctccactacctagtagacaaggacttcctcaccccaaagacagctgactacgccatgccagctttaaagtacagcatgctcttctcgcccacagagaaaggggagagcatgatgaacatctacctggacaactttgaaaactggaactcttcggacggcatcaccaccgtcactgggatcgaatttggcatcaagcacagcctgtttcagggctacctcctcatggacactgtgtaccctgccatagccattgtcatcgtgcttctcatcatgtgcgtctacaccaagtccatgttcatcacgctcatggccatgtttgccgtcatcagctccctgatcgtctcctacttcctctacagagtcgtgtttaactttgagtttttcccctttatgaacctcactgcactcatcatcttggtcgggattggtgcagacgatgcctttgtcctgtgtgacgtctggaactacaccaaattcgacaaaccgcgtgcagacacatcagaagcggtgagcatcaccttgcagcacgccgccctctccatgtttgtcacaagcttcaccactgccgccgccttctacgccaactacgtcagcaacatcacagccatcagatgcttcggggtttacgcagggacggctatattggtgaattacgtcttgatggtcacctggcttcccgctgtcattgttctgcatgaacggtacctcctcaatatattcagctgcttcagaaagccccagccacaagcctatgacaagagctgctgggcggtggcctgccagaagtgccgcaaggttctctttgccatttcagaggcgtctcggatcttttttgaaaaggtgttaccgtgcatcgtcatcaagtttcgctacctttggctcatctggttccttgccctgactataggtggggcctacgtcgtgtgcataaacccaaagatgaaactgccttcgttggagctttctgaattccaggtgttcagatcctctcaccctttcgagcgctatgatgccgagttcaagaagcttttcatgtttgagcgggttcaccatggagaggagctccatatgcccatcacggtaatctggggtgtgtccccagaagacagcggcaaccctctgaaccccaagagcaaaggaaagctgacactagatagcactttcaacattgctagcccagcctcccaggcctggattttgcacttctgtcaaaaactgaggaaccaaacattcttctaccagacggagcagcaggacttcaccagctgtttcattgagaccttcaaacagtggatggaaaaccaggactgtgacgagcctgctctgtacccttgctgcagccactgcagcttcccctataagcaagaggtttttgagctgtgcatcaagaaggccatcatggaactggacaggagcacaggctaccacctgaataacaagacccccgggccaaggtttgatgtcaacgataccatcagggccgtggtgctggagttccagagtaccttcctcttcaccttggcttacgagaagatgcaacagttctacaaggaggtggactcatggatctccagcgagctaagttcagcgcctgagggcctcagccatggctggtttgtcagcaacctggagttctacgacctgcaggacagcctgtccgatggcaccctcattgccatggggctctcggtggccgttgcatttagtgtgatgctgctgaccacttggaatatcatcctaagcctttatgccatcatctccatagctggaaccatatttgtcacagtcgggtccctcgtcctgctgggctgggagctgaatgtgttggagtctgtcaccatctcggttgcagttggcttgtctgtggactttgctgtccactacggggtggcatatcgcttggctccagatcccgaccgtgaaggcaaagtcatcttctctctgagtcgtatgggctctgcgattgccatggctgcattgaccacttttgtggctggggccatgatgatgccttccacggtcctggcgtacacccagctgggcaccttcatgatgctcgtcatgtgtatcagctgggccttcgccaccttcttcttccaatgcatgtgccggtgccttgggccacaaggcacctgtggccagattcctttacctaaaaagctccagtgcggtgccttttcccacaccttgtctgcaagtcctggtgacaggggaccaagcaaaacacacactgccaattcttaccgtgtagatgccagggaccccagatccgaactggagcatgagttttatgagttacaacccctggcatctcacagctgcagtgcctcagagaagaacactttcgatgagccacacatctgctccgcattttccaatggccaagcaaagactctagggttgcctgtgcctctaacctacaacagtgaactcaccaagagccccagaaatgaaccaggctcagccttgttacagccttgtctggagcagggtgccatgtgtcacttctctctcaatcagagatgtagctgcccaaacgcctacatgcacttaaaatatggtcctcgctcttgccagcaggtgggtgactccttgtgccaacagtgtgcttccactgctagcagctttgtccagattcagaacgtggtggcgcctctgaagaccacacaccaggctgctgaggtccttatgcatcccatccggcacatgctgccaccggggatgcagaattccctgccaaggaatttttttctccacccagtgcagtgcattcaggcccaagagcaactggatgacagcagcatacacagtcttcagagcatggatgagcatcttcccaggacagcagagcctctgctgcctgtcagcaggagccctgaggctttccaaagagcttgttgccatcctgagaataaccaaaggggactctgcaaaagtagagacacaggggacaccgagggcaatggagggaccaaaaccaaggtctctagtttaccaaaccaggctgacaaggcagagaagaaagtggagccaagccagctgcagactgatgaaaatgtgaactcagaacatttaaaccataatgaaccaaaatttatattcagccatttactaggagagactgactgcaggtcctgcccgagcagtccacaaagttgcagaagtattgtgagattgaagtgtgattccacagactgcacgatgccaaaccttgaagccagtgtgcctgctgtaccagcacactcagaactgtctggagaaagcttgttaataaaaacgctataataaatctagcattgcattcagaagcaccgcctctgtcactcttttgaatcaggagaggggtctaggagcttacagagggaggctagcaacaggcatgtctcatgtgttaccatgtttacagtccagaatatctccatattctgtctgaatggtgaacaaactcatagatctagtggttactggactttcaggttactagggttttgttgtttttgtgtttgtttgtttgtttgtttgtttgtttgtttcaaaaagtaattcttgtacattctgtcctcttgtactgtctatcctcttgaagcagtggatcgaattgaaagtgtgagttacctagaagattcggttctcttagtcagttcctggcatcttcattgtggtgcatttggctgatggtaattaagtcttctcgttgctcagcataaatgctaggactcaatttaacaaagatacttcagttagaaaccaggaactaggcagcattaaagtacatgttaattaaaagtcatgccaagcactttaatatactacatttgactcgtcctgctcggtgcctcacatgaagcccagggcacatttatatccagattggcatcttcccacatcaactagacggacagttgctgtcacacctcctaacctaggagtcatgagtgtcatcgctgtcaggtgacaaccatctgttagtaccacagaaagaagtgtgaggagccatgatcacccatgaagcactgtgcttcagtggtacccaggtcagctgtgtgcgggctgcccaaaaccttcagagtaagggatcctgttatatggagtgttgcctccatctggtcctaaggggccatgttcacaaggcttctctcacctgtatcccaagatgtgttaagacagcatcagcatacagctgacacctgggaatactaagcctttgggcagcatctttggtgacagcgtgtcgtatgtcagatcagtctgtggtcggagctgttggtgcataccttctgggtagtatgagaggtgacacagccccagcacaccatgtcacctgacacatcccagctcactcagggactgcctacctccacctggagctacacattcaatttgttcctccgaggaatctggtaggaatactcttagatagaaaagttgctactgaaaagtcttagtagttattttctaagaatggttttccaaaatccatctctatagtcccaggacctgaaaaaaaaaaaaaaggctatcaagagctgaaaggaaatgtataatctcgtgcccctctgtcaaagcacatctttgcagcttttgcttgaataccgtgtctgcctctcttgagccagcctgttgttcattcgggcttctttcaagtctatgaagcagtgcaaacatctccaacgtatccaccaccgatgtccctccaggtgcttagatgtctccctgtcttcccactagcctgctccgctcactcagttgtcctgtttatcagatggtgcagttatgattgtccttgggcaagcgccaggtgaagtaccagaacagactgctgacacaccttgaggaagtctggtccccgggacactgggcagtgctcccgttggctcacttagagatagacaaactgtttggctcagcattaacagccaaccctagagaaaccagctgtgtctctggcacagggtctggtgctactctttcaaacagtgtctgcccaacccccactgcatttagttcttagttcaggtgacctgggggccatgggctagaagtcaggactcagtgcccacggtgagagtctttgtttttcttctgaaatgtgtaactatcgagtcggctaatgaaaatccaggggtttcaaagcaggtgtgatctccaccaagctcccacattgcattctactaactgccctggtaaggagcgaccggtggcctttgtccctcaccagctctgtttaattgccctgaaccttgctgggcctgtgggccctttgcacatttacttcagggcagacgagctttgacctccctgggtttcatataggtttacttctgggttgggttggattttagcattttattttactttatgttaagaatttcattgctggagatccaaagatatatatatatatatatatatatatatatatatatatatattatataatataatataatataatatatatatatttcttcactatgtgcagaaaagcatcaccacttctggttctgtgtcacagggaactttcccatgttgtctccaaatggtgatgcatgaagaacttccacacagggaaaagagcccagtgcgctgtgaaacactcacagcctggaggtttggtgatatggctttacatatttctctggctcccacagacccatttttgattgctgaattcctgttaccaaattgggtgcttccctcttcccttgcaaggtcaccttttaaatcctcatttgattgagaagtggacttggccaagtagaaggtgtttttcataaggaaaagctttgtttgaaataatctcacatcttcatcgatgtgtgttcgttgctggtatgtaattgctgcagacatacagccttctaaaatgtttctcagagatgatgctaaactgccattaaactttaatttcaacaatctatgcaccagcctcaatcattctaaatttaaataattttgcagggtggtgtgtagagcactttcacagatgtggccttcaggaggttaaaaaaatgtgtgcctggttcccattacttcacctggaaactatctccccatcagcaattaggataggttctaaatgaaaaaaaagaaaaaagaaaaaaaaagaggcctggtgactccaaaagcagctgtgtggtttcatatattaatgaggagagtcattttagagaaaaataagatctgtatttttttaaaggaaaggactgattttatttttcataaagttggagcatagcaaaaaaggaatttgctgaaatcatgagatattttttgtttaaaatgcaaaagcagctgttgtatctgtatgcttatacatattggatctttccaaatgtttgatctccagttgattttaaaaggcatttcttgttagccatttttattggtgtttggctttcgatgctaagaggttccatatttttgcactgagtagacagggaaggtaacatggtgggccagtagaatcttctgcctgttgttaaaaataatatttaactgctataatttcatattttgtaagggaagaaaaagatggcattattcttgatgttagcttcatgaaccaaaagatgcataccctagatcagttcagaataaccagggccagcaggtcttctcagctgccccagctgtctgttgtgcataaagtggacattgcaaatgccagctggggtccagaagtaggggtggtgttgcaatttatagaggggtgcatgggatacaatcctgacattccagaagtcattgtcccagaaagggctcttcccagcttgggattcactaactcggtgttggcccaatcgagtttagcctgcagcatgccttggaaattcagtggagattcaagccaagtgttgagctagccgtcatcacctccacccttctcctcaaacccctcagatgaggtgcatctcttgactcactctgactcatgctgaaataagacctagactccacaatctagaattgactgagacggctaaacttggatattaactcaatagcctgaaacttgcaattccatctgtcatggactccaccttcctaaagagcgaagggcagattacttttcacaaggaatatttgtctttggaaccaaataagattcttaagaacttctttcaacttgagataaagtagcagagtaaaatttgcccacgttctatgtgtcaattaaccatttttgtgtgttttgttttgccatgcttggaattcaagccagggcctggggctaattagacagttaaaggaaaaaggatttactaagtaaaccaataatctaaacaagattacaaagcctgcctgggaaaactgctagaattaaagaacaaaaaacaaaaacaaaaaaacccctgttatcctgcttttgcaatgtgaaacgattgttaaaaatgtcattattaaaaactggtctactagggttttctctcagcaatggtttcagtgcagggtgagaataatgagagcacacctgtgtttacgtagccttaaatgtgctccctgtggcaccatccagccagctggggatgtgcccaggtctgcacggtgctttctttttctcctgacatcaaccaatgtacttcactgaggtcttagaggaacaaacttctctctccagctaaatgtccttttgcaaagagatcggaggacaggctttgcagaacgagctagtccctgatgatatgacagctgactcaagttcaaaatgtttggtcttttctagaccttggatgcctgtctccttttagagcagcggttctcaacctgtgggtcatgaccccattggggtcacatatcagatatttacgtcacgattcgtgacagtagcaaaatcacagttatgaagtagcaatgaaacaattttatggcaggggtcagcacaccatgaggaactgcattaaagggtcacagcgttaggaaggttgagaaccctgcagtagagtgtgttgttaaccacttacagcagcagaagatacaagtatatggaataatctcaactgttgcataattcctccccaaatctccacctaggtttctttgctctaaaaagaagcctgggctcccatgagcaacaaggggaattccttcagtgagcccttgcactgccaggcatggcaaacacacacttttatagctagcagacgccctcacaccagccactgtgtgccagtgtggctcagaagaccagtgcaagcacagatcctgccctacattcatccagacccctataggcctcagaggctagctaatgactcttaggcttttggttggttaaactggagtcttgttaataaattctgttagtcttggggtgttaggtctgatacagaagtgaccatggaatagctactttggaggctaaagatagcacaagaaatactataattaggacatgcaacactccaactgatggatgactgtttccatcagtgagtccgcctcacgcacagttcaggacaaggtgaggtttctttctgggacttctgttcacaatgtacacacgtactctgatggcactcatacaccaccctggctgcccttatcccttgtccactcttgttggctcccttctgtccaactaggctcctccctgctcccatgcctttgtccttgtttggtttgcttttgacaccttgcgcacgtgctgtgagctcatgattgtgacagccgtgtcattatgattgattgtgacagccgtgtcatttccagaaggctgtgcttcacagtgctcctccagcctcacagtctttcttcccaggtttccatgaccttccctggagcttggaggggatgacagagatgtctccttcaggccaaggactaatgactacattagctgttccactgcaaacagaagcatcactggcccaagccaagaggtgcttgtatggatatcagcacaaatattacaaggcagtttggttctgtgtccatttagcaaaacatcagtaggatggtggtagcacattctcttttaaatgtctgtgacttccccagctgtgttagttacttctctgttgctgtggttaaacaccctgaccaaaggaagtgagcatttattttgaattccggctccagagggataagactccatggtggcagggcagaggcagtgagcagcaggcttggtggagcagaaccaggaagctgaaccataagcaagaagcagtgagagcaatctggaaatactaagagtctttaaaccctgaaagcctgtctggtgacatgacacttccccaggacagtcaataggctggtggtaaggtctgcttctggtacccggatgtacccagatcttggtacacacagaagccctcagccctctgcatccttgcattagccagatctactcagtgtcagctggtcagggttccccccaacacagagcagggagaagcggccggttctctgtggacaccgaggaatcttctgtgagttctagcatggctccccaggcagctctgtcccttctcccacctccctgccacacttccttaggactcccttttctcagaagccgaaggcctgtggtaccaacctctgcccttaggggaaagtccactccgcagtaagtctggagactgacaggaagcacactgccacgagagggggactgggcaggggctcttcccatctgcagggacaaggctgcaccaagataaacaggagactgttcaccctggggattcccagacgacgtgtttcttatttaaaggaaagaaagggatatcctgacattgatctgtgacatggtccctgctaggaacccacaaggggaagggccaggatgtgagctgtcctgttaaccagactggaccagctgccttgaggaccagaaacagctggactgagctttgaggggtgaagcaaagggaaatcgatcctgagatgctggcttgcaaaatagcccaagacccaggaggcagcaatgtgagcagaggcctgtcctgtctcctgttgggtggcaacctcaggcatcatacaggatctgtcaggaaacacctcgagctgcttctggctgccttgcctacaagggtggggctgagaatggtaggtgacctttctccattgccctcttctacagaggcactggaagtcaggctctcagtagcatgatgatcactccgtgtcctgccctcactgtctgggcacatcaccaacatatctgtgaggtccatgtgcaccccggccactgggaacaggaactcaccaggtctggtagccatctgcccctgtgccactccctgggatccaagttcctaggagagctgttttcatctccatgtcctccctcccctgggaacatggagtgggctgatggcccctggagccttgcactgcaggcttctcagctttctcagagcgatctgattttcccaccattgcacacgcggacacttgatagtgagctgtttcaccgccaaagtccaactgtttcctgctgttggaaggagcataggctggctgcctcacatcgtgaacaactctctgactgtgaggagcatagtgctggggtactgcaggtgagggaaaccgtgcttgtctgagagaggaagtggcctcagggtcctcgtgtcaatgctgaagtcggggcatcttgtgcccttcttgccatccttaggaccctgtggagaggaaggggagccaccatccaggctggacacctcagagctggttgacacgcaggcctagtgctgtcctgctgcctggccttggctggcctgtggctgaccatacaggattggtgttcacaagatggaaagtaactgtgttggggaagagggtttgtaagatgtgggatctcactgggaggaccaaatttcaaacccagaacccatttaaaatgccaggattatattgtacttataatcccagggctaggaaagcaggggcaggtggatccctgggagcttgctcaccagctagcttagcctcatgtggcagacaccaggccagtgagagatcagttttaaaagggaaagcagtgattactgaggtacaacatctcaggtgttgtccacacacaagcacacatatgcacacgcacacacagacacacacactcatatacatacacatatacatatccatacagacatacatatccatacacacagacacacccacagacatatacatacccacagacatgacacatatatatacatatacatacacacaaacatatacatatagacacaaacatacacatgcatacatacaggcaaaagtacacagacacacattcacacacagagagaggcctatgccatgcatacatatacacacagatacacacatatacatacaatgtacacacacacacacacacacacacacacacacacacacacacacacacctgacgtacatcccagaggcccacacaagggcagaagatctgggggttgttctccagagatagcaatgggggcagacccagggcagagatgacagctggcctgtggagagtttttggaatgtgagatgagcctctcttgttttgcaggcattggaacgtgagacagggcctcagcttgttttgcaggcatggtgccagttggctctgattggacagtgctctctggcaggctggagattgctaagaagagcagctgagctctgggccatcacacttgctcaggttctcaggttgggtttagggctggagggaagcaaaggaagaccagaaatcgtgaccactggaggcctgacctctccccagcaccctccttctccagaaggcttctctcctcttccactggactgcagctacccttcccagggatgctgctggtggcctctcctagtttatgtcacagttctctgcttttttttctgggcagtccaaaattcttcctttctctttgaccctgccatacactctctggcctgactaaatctcatggttttgaggaatagtttacctcaaagtcttctgtggaatttgagaacttactgtgacagccctttaaatccaatcataaccttacttggggatccctaataatcaatggggaaactttggcaagagtaaaaaggttctgatcacacagcaatcaaatcaggtcctaggagtgttgctaaacctgaccgtttgctgtttaatgtgctcaccagggaggaccctgaaatatctaaattggttgagttgtattgaccatatagttaaactatgtaaaaagacgtagtagaaactggcacagtcttcttctcttataaatgaggccgtggtcacgtggcagtcttctacagtttcttgtcggccaacatcaggcgatcccacagcagagcctgggcttctgcctctgagggagggattaggagtgtgaggctgggacaaggctcttcagaatgaagatggggaagtctgtagcccttgccagtcacctgcatgacatgtctgtcccagagctggtgaggatctctacaccaagaccacccctccccctcagcctatggtaatgaggttaaccacatgtcttggggagaattaatccattcacaggcttctcgagttgtcttgaggtccaaggacccctgtgcaagtctctaagcaaagaggagtgaggggtgataattggctttgttgtggggagttactctggtgtgctctgctgtcaaatggcctctgcttggccccatcatgggaggggatggcaagctgcttgtggcacaaaactgggtgacagcatctcgttccctggaggaaagtgagtgtaggctgctagagaatagtttttgaaaggtcacaggacgggtggcatgtttataagaatactattattattctgcccaaggaacagcttgggcggctcaggagtgcacaaggagagttacagatgctgcagagcagaacagtggagcaaggcttgcttcctttcgtaatattctccccagagccacgcgtggaaggcttgggtttgggtttggcactattgggagatgtgggactttacgaagtgggactttgagggaggctttaggtccttggtgggaccccagtctcctcctcttttgttccccaggtgtgaggtgagtggttttgctcctccatgcagtgcctgctacatacctcaccactgacccaacccagccagccaatcacagactgaagcacaaactgggagataaaacaagtcttctcttttcacaagctgattgccctgagtatttgttacagcaatgaaaagctaacctgccatttgcacatacattagcttgccctcagtttcccagtaggtaccagcccttcccagataaagccttggggctgggcactactgccaaaccaagtcccacaggatttaccaggctctgagattgtgtcactaatcactggcttatcctttcttcctctagggaacttcagacggctggaaagattcccttggtattttagaagaacataataattaagctttttgaggggaggatgcttgcagaagttcaaattagatgctatatcaggagattatgggtaccactgccaagaagaaccagcaaggagggctgccagtggaagaagttgtgttccctgaattatcagtggagccatgctggcctggtggggcagaggttagggtggtgagggagtgagtaatgccttcccagtacctccacacagtctgcatctggtccccagccctgtctctggaccagttaggtcagggggcactggaagctcttcttccaagaaactcgtagaatctctgatcttctcagacagtggacatggggacaggccagcagaccccttgccacatggcctcaggagtccccatcaattttccctagagctgtcacctactgcaaaggattttctctcattcttcctaaagtcctaaccatggaatgccttcttcagagactcctaggctaggagacgagcacctagattttctataggccctgtgggctctaggctggctttggggacctgttgggagcttccacaattttctggaatccctcagagaacaacactagcacctgtatgatggtactgtagcctgatggccaagaggccagtcagtatatgtcatgttgaagacatgagcaccacatccatgccttctgtgtctcctgggtgatcacagtggcttcattcggagtcacatctccgtatcttgccaactctggagtaaagctgggtcaaaaccttgtctgcaggatgaggccccaggcctgttaccaggcaggggacttgatatgcactgcctgtgtctcagctctgaatcaaagcaagctgtgctatttgcaaaggttgtagggccatggggatgggggcctaggaagcagaagtaggtttccaaaggcattgtgggtaacatcagctcctggttctagtccaagcttcttgccctctcaactgtcaagatgtgaacaggtcacgctgcagttcctggatagcacggatggagctgttgtagccaccatctgtctgtggctgtccccaccgtgatggacccatacccctgagtctgtgagtcaaagtaaacaaacaaaaaacccaaagctagtggctagggtttgtctaacgccctctttatagagcctcttctggtcctctgacttacaatgggattcccatttccagatgaggaagctgaggctgagaggtcaaacgactaataaagaataaagccaccagtgctggttttgaaactggatttgtttatctctaccacccatatttttccactcatgcttccccttgtcaaagccactaggatgctcctctcgtcatccccctagcattcttattccctgtggtcacttggtctttcagaaagggctctgggattctgatgaactgtcctcaaaggaccagtggaggataagtactacccagagccttcatcatcaggagcctggttgagaggggctggcatccctgggactctctgctggaagtcttctagcccttgtgaccatggttggcacacttagaaaacacaatatgggacccagcaaataacacaacatctctgtggtctccagaaccaaatggtcactcttaatcttaccctggtggctgctctggcccctgctggaggctggagagagagctgagctgtgggagaacagagaagaaaagatggttggcaaggctcaaaatgggctggcacaagggagttgagctgtgagaaggccaagagtaagatggacacccatctgcatccagccttgtctttacaatccttctaacccctccctcttggtgtatcacagagactgaggggctgctgggtatccatcaccctaagaggccattttgcagaagagggcacagggaaggggtcatccccatgctaccctctggtaagcagacaccgtgacagtctcaaaaaatttctccatctagaagaacagggcccaggagttctgttgctcttctccctcttttccagagaatcagttccagggatagcgacatgcccagcgtcaggaggcctgacactgtgaggctgtgagtggtgttttctgtcactggtaaagaagaggcttagcctagaggagagcagcccttggtccccatgggaaagtcacaaggacacagtattttcaaagattttttttcttcctgagaatgctctcacacatcctgggagttaggagataatgcatcagacatcactatacataaatactttgcattcagacacaccgtgaggcaactgtggcgatctgccagattctggttaaggacccctcagtgtcactccgccctgttttattcttgtactatatgtggcaacagcagcaacaaacagccactttattttcagtaaacaatttgtgtcttcaaagtccttctagatatggtctatagagacactgacagacgaggaaacagacgtcaaagactaaagggctggttcagggccagtttgtttggcaccagttgaaaggcaaatatgaactctcctagctggggccttagaagatttgcttggaagcttccttttgcgtagaggcagctgagccttagcaggtattaaatcaaagttgaggtcttgatttcactgcatgggagagttccaccatgcatggtagacgacatcagaactctccttgagtctcaggatgaactggccgtgcatttggctgcaaactgtccccaactagggtgaggagccatgggggctacagtggatcctctttagcttgggtgagaactcagccaatgtgttggccccaaggactggggatgccgggcaagtgctccatttctccacatgtctctagccgtgagtcattctcacagagatttccctctgtccctatgtctcgcagaagcaccagcagggctgtggcatgtcaagaaagaatggttcgtggagaccagtagaagggagtcttcagttatgggtcaggttttggctttgtcacatagtttcttgggccatatttccttaagacaaaggcaagactcacaggtgtcaaagggagcatggctgtgtgcgttccttgatttgggaatcatgcaactgtaccctgctgggttaagttgtacggtttgtgatttttattaagacaaccttagatctaactttcctatccttccctccctttttttcctcccttcctctctccctctcttctttcatttctgtttgcttttgaaacaaagtctcaagtttgttaagtagctggtctggaacttgctacagaactgaggatagccttgaagccctttcctcccaaatactgggattacaggaggcttcacacaggaccctgacattatttctggattttgttaaagtaaatcaagtctcttggttagtgggagacttactttgccttggggctgtggccaagagacagagtgctcaaccactggctgtaggaggcagggtctgagggtggctgtgctggtcctgggacagctatgctaaccctgcagttgctaagaagaggggcccttctctctgccctgctttgtcctgcttggattagttttgcagatttcctgtgactgtgagctcctgaacatctttttttgtattaaccaggcaatttctacagtgcacagcgctgagcactgcttggcttttcaccatcgtcaagactgtcttcagttttaatgatcaattaacacttgactcagaatccacagggtgccagttcttaatctcgaatggatgctcagaggaaggctgtgacttgatttctcccaagaggctcatatggggtgcaaaggtaccagattttacatccgacaaaggagctttggggacatagaagcctgggctggaacacactgcagagatcgtcctcaggaaagattgaaatgggggaagatgtctagtgcatctcgatgtgggacgcccttctgtatgctgtgaatgttttattaccattggttaataaagaagctgatttggacaatagccaggaagaatagagccaggcaggaaatccaaacagaaatatggagagaaagaaagtggagtcagggagatgccatgtagtctccaaagaagtaagataccagaacattaccggtaagccacagccacgtggggatacacagattagtagaaatgggttaatttaaatatgagagctagttagtaatatgcctgagacattggccaagcattcataattaatattaagcctctgagtgttttataagccactctgggactggtggacaggagagaaatgtccatttacagcatcttctccaaacacacacacacacacacacaggcacacacacacacacacacacacacacgtgcacacacgcacgcacgcacgcacacacacacctgccccagcttttttttcttgagacaagctcttcctatgtagttttggccagcctggaacttaatatgtagaccaagctagtcttgaactcagagatgcccctgcctctgcctcctgagcaccaggattaaagacgtgtggaaccacgtcaggctccagggaatcttcccaggtactatcctccctgtctgcagcgagcttacaacctctggaatgtggagaaacctgacaatgacacatgtggtttcttgtccttaaaacttccaatgaggtgtgtgcagtgggatgaaactgatgggcagcctgtttggagatatttgtgaactcattccaaccttgctatctccagcaatgttgtatttattccctcattaattagtgagttagataaataacgaatgcttaatttgagacagtgtcacagtaacaagatgtttaacaggtgttcattgtattcattttttaatgtcatgaaaagatgacaatatctttactcacaacgacaaatgaggacacgggttcaggagggaaggtcagtgtctcaggtcctctgagagacagaggccaagatggggctaaacccaagcaacgtttatcaggggaagtgcttgtgagagagcaaatggagagagcgatgtggtagcacaggccgccattctccatcacctgggagttaaaaggaagaaggattaatagttcagggtcatcctggactacatagcaaatttgaggccagccttggctaagggaaaccttttctcaaaagaaaaaaaatctaattaaaaataaataaaaagtaagtgtgtcagggtatgagaaatgagaaaggactatccaacagacagaccttcaagtgaacggccacaagcaggagagttgagtggaattatctagacctcggtgtagactaaggccattaggctgcccattttatgcatttttcacacctggacttaaatgtttggagtcttctgtcttacagaggagaggattctgggaacggtgacagggtaatcaatttaagatacactgtctgactataatttggcgtggtcacagattaacctaatggagtgactgtggtctactgtagatgggttgggagacgtcagcaggaaccagcttgtgcacacagaagagcctgggttcttgccacgtccctaaatttgaagggtaagtgatgaattccatacagagtcagcttccaacaaccagtgtagatacccttatgtttctgagtcttcttagatgaatcccaagaaatttctacaaccccttacttcttggttgggctgtttcctgtgcattaggaaaaggatctttgcttcctgtggctctccagttctcacatgctctgaggcaggggtggggctgactctgtcttttgagtcacagcattggtagcattctcaggggctgtattggcttagtttacatcctagtatttgccacttgcaggaaaccatggagttggcttagcccaattgccttgagagacatgtgttataggtttgtcaggttagagtctatggctcctggggtacaatgtgccttccagatcctgagagactgacgcactccctcaggcagtgaagtgttcaggcctctttgtgtttctctgtatgttcccttagaagtcaaggaagcatggaagtgtgacaggacaacctggtatagcctgcaaacttactggcaactacaactgtatcgatcctcgcaattgccattgtattctgtttctgataaaggtataaaaagtatgattgctctcaataaaactgtcacagcctcagttgtgctgtggctcctccaacctggcgggatttcattcctcacaggtgaccttgacctggtaagtaagcgccagaacttcacttacagtcacttctttgtttttgtttttgtttttgtttttttaatgtttgttccaagtgattcacttggaggtgaggggaagagggccaggaaggggagaccagcaggagcaacaccccacaatctcacaatctcagagaacatttgaatgttccgacccttttagatgagacttgggaaggtaaaaaccagagctgaattgactctacaatgggagtctcccatctctgcgagtgtgtgtgtgtgtgtgtgtgtgtgtgtgtgtgtgtgtgtgtgtgtgtggtgagtatgtgtgtgtgtgtgtgttgtgtgagtgtgtgtgtgtgcgtgtgtgtgtgtgtgtgtggtgtgtgtgtgtgtgtgagtgtgtgtgtgtgtgtgtgtgtgtgtgtgtgtgtgtgtgtgtgctatcttgccacaacttattcctctgtttgctctttatcaagcaggccttaacccagtagggcaggggcagcatgagatagaaagcctaagaaactcccccagagaacttcatggatgcagagaggaactgaactctgggaagggactctgaaggaagtcagtcgtgtaagggaagacagagagaacatggcttgtgaggtagcagggttctggacagtcagagtgtggatgctgaaaggaagacggcaaggaggaaggagcatgaggtagaggagaagaggcagaaggaaaagggggaaggaaggaggagggagagaaagagtacaatgaagagagaggaaaagaggaaggggaggggaaagcgggaggaagaggaagatgagtgaacctggggagttgagagagaactaagagtcctgaacaccactcaaggaagtgagggccactgtaggaatgacacagtgacccccacaaactcaccctggaacaatcttctttctctcagtcaagcatcctgagagagtggtactcctttctaggcagacacgcccaaccttaggcacaagggaagaacacagagaggctggctcaccccatgtctaagtatttaaaaagcgccgagaagccaacacaccctgaagctcagagtgcctgtcatccatgctgcacaactgcactctcagaattatctagtgaggcaggtttgagcttaggatgttagacttggagtccttggtcagaggctgaggctctgggagagctggccacagcccaccgcgttcctctagctgagctccatctcacactgaggagacttcagtggacacatggaacctgatgttctagctgttcccatctcccacaaatcctgtctgtggccttcctttggaagagaaagacttggtaacatcccatggtgatcaacaggcagtcttaggactgtttgggtgggaatggggtgtctggcgtggtgatattttgtttgtgcctgaagatcagagtgtggagctagccactagttagccacagaggacaggcagtggtggcacacacctttaatcccagcactcaggaggcattgcagacagatctctgtgagttcaaggccatcctgggctacatgagattgattcagtctaaaagagaaacagagccaggcgacagtggttcaggccttcaattccagtatttgggaatcacatgcctttaatcctagctctaggaagattgagacaggaatggatatgactgggtggagagaggaatataaggcaggaggagacagcccactcagtctgaggattcctagggacaggatatcccctttggtctgaggattcagagaggccactctgattctctgattttcagcaaactttatttgttgaggcacaaacaaaatatcaccacaatctaaacttcaggaggcagggccagggctctcctcagaggtgttctcttaatcctgtggactccttgctcaagaaaatgacagcagccagaggaaggctaaagcctagggcccagcagcccctgttttgtgaaggggaatggtttctacgcctcaaagaacaacaggactatggtgcccgtaggctgtggcttacaatccctgcagagtttttccactgtggatcaagatggattcccctggctgtggcccacgacactcatccagttcctctgcttcaacttctgcatcaaatctctgggctcaactttgctcctctggtctgacagggctgagaagtgtcctggtgctctgaggggagagggggtgtcttcacacagccttcagaaggtcccaacttctccatcatatttacctttaaaatgtgtttatacacggcctgccccatgtctgtccttttccttccacgggcccggcagctctgtctttggaggtctgggtggggaccagcgtttggcaagaacagcaaatcagacagaatttatactatcccttggccagtgaccattgaaagggtccagtcttcagactgagggtggagcgaggaagaggtggtgtgggaggagagggaagggagaaagtgagaggagagaagaaaggagggtgggtggtagagacatggaaaggagaggggagggcaggggaggggaggagaggggagtcggggagaaggaagagaagaagaaaaagttcaggtggggggaggagagatgaagggagaggggtggagggagaggagagggagagtgccagtctgggggaggcctccattaagccatggaaattgtgagatttatttcaagtcttaaaatcgaaatatttttcctgggttccctccttgggaacacttatgtgtaggattaatttatgactaaatctcaaatcaaaacagttcgtaaggcccaacacccaataaagtttccatttagtttctgctcacatttcctccccacctggcaggtcaaggtctcctggctcctggtgtgttttccatcgccctgaagacctgcccctctctgggtctccactgccttagacatctgtctgtctacactgaggcccctgacgagcattcatagccatgtgctcaactctaggcctgtcttcttcataacacatttgtgccctgttattgatttatacagtagctatgctgggtagctctgggctttgacttggaggctgtgaggtccccagggaaccctgagcagcactgctctatcctgcaaaccccatagagcagagaggccaggatagcaccctacacagatggtctctgttgtaatcatacacagctcatagacatcctagccacaaagtcagaacaggacctgggaaatcacctagttttacagagagggaagcagaaggagagtgtcccaagatacttcaaagttcttgttctagaagtcaaatgcttatatggcagatactccatgctggccaaggcaagagagcaggcaataagagcagaggcaggcttgtgtgggctcctgcgccagcatccaggaagagcagacatgtatggggagagctaggaagaacaaatggagggtatgtatgggaatgaagtctccaagcccaggctgggggaggcagggctttggggccgcacacagcttgggttgctaaggatcttccttgcttctgagtctagaccaggagtgggagtagatccaagaagtgacttcctggcctttgaccccatagtgctctgcatgtttccttatgggatcttattcttggtcccaactgtgaattctgggaattagctgccaataacccctcacacctcagatacttgtccccaactgtccctatctctccctgccctgacagagtcagctctctccctagggtgtagatcatactacaaccttcctgctgctgcaaccggttcccttctccccgctcatcccactactcgcccttttccctacagtgtctgtagacagagggacctcttgaggtgttcctggggtttctgccacctccctctctctcttcactgtttcagtgcatggctctcagtcggtcttagcattgattgattgccattggaaggagccaagaagtagcatggtgacaaagactcgtgagggggaagggaggaagaggggagcgctctcctcaggctgcctccagtcccatgctgcagccttgccactatcagttagtgtgctcctccccacggcattgactggcaaggagctgcctgtcctctgtgctttcccactgacactgcctgcctgcgctggggttgccacccacacatttagacatctgtcatggctcctcacccttatggtgtgtctgctctttctcagctctggctcatccctggagtgcctccattgaagaccctgcgcactccttgctccccatgcgaatcacctgacaaactcaggtcaaatcaaaaatgccgacctctccgtgtgtcaactggacttgaccggggacacccgcgcgtggactcgtgctgtctcgggctcctggccatcagcctcggggaagtgtcaatggtcttttcactttccgactttgggagtgtcacgtcacacagcccctctcccattccttcaatgccttcctccccacactgactctccactgatcacttagcatattgataatcaagaagtaataaacaataatgggcatggtgcctgtgccgtctccgtggcatcgacatccctccttcactcatgcctgcctcttggccttccttcccgttgctatggaagatgcttctgtggaacccgaggctctgcgttcctgcactaacacttcattgactaacacttggcattgtcacactgcagattctgtggcacctacagatggagggtttgcagtgtcatttttctaacagcatgcactcacttggtgtttatgtcgctaacaatatttcagacttttccattactgcatgcgttgtggtgatctgtgacctgtgatcttcagtgcttctatttaattgtttggagcatcaagaaagacgtccgtaatggatggcaaacctgattcctaagtgctgggtgtgttctgactgctgcttcatccgggcgctccatctctctccctctcctcggttccctgagacaaacgacatttaaagtagaccaccagttaacccctgtaacagcccgcagtgttgaggtagaaggaagacattctggtctctcatttgaactcagaaatgatgacacctgggaagatgtcaaacactgagctatgccgagagctaggcctctaacaccacatagacaagctgaggctgcctctccagtgaacacatgagcaacaaaatagtggaaccagcagtgtttgcagaatgtgattggggaagctctgaccatgacttcagagttgtttcccgcacccttgctttaacacaacgacaatctacacctaggcattcatcaaagcattctccacactgaccaaataagagcctgggtggggggtagtggggcgggggaagccatatgatttgcaatagctgggaaatcattccttcttctccctcacacacggtataaagtctttcccatgggccccaagctcctgctttaaaatataacggagctgcgtgtacagaatggtggggagcatgcttagcggtaggcattgagcttgagcctcaatacttaggaaccaaataacatgaagggatcaacgattacactacagcttgtattttatatgcatatgcaaacctaaaaacactgtgacttgatttactgcaatatgcttttttttttttttcctgaggcaaactcagtatgcagcccaggctggccacagatggggactacaggcaggtgctaccacctggctgcaacattcctttcattgagatagtctggaccccaaagccccatatctccaaggtatttgtcctagatctttccagataattacgtaattgtattctttgttattgcatgccttccctccccaggccttctgattgcacaggagcatgctgacagtctgttctgagcacatctcagctctggctcactcacaggacctcctgtaccttctctcccagccatgcttctttctttctttctctctttgattttttaaaaattattttatgtatatgggtgatctctcctgaatgtgtctgtgcatcacatgtgtccctggtgcctgtggaggtcagtagagggcatttggatcccctggaactacagttacagacaattgcaagtcttcatgtgggtgctgggaagtgaacctgggtcctccggaagagaatcaagttctcttattctctgcgtcatctctccagccccccaggttcccgctaaagagagcctttacatgcctgcccatgcatgtcttcctgaattctccttcacctttcttttaatttttttttttgagacagtcctacgtagaagagtgagcatctgtcttagtgtccagctcctctcacagatcacagccttgcagtcaccacccagctcaggacatccagcccgggcagtccccaaggcagcacccacctggccctccacggtgaggaaggcaaggaccaggactgcgctgggaccctggtgaccgctttacaggcggtgaggatttagggtgaatcgcgatggggtggggtggggtgggtggggtggggtgggagtttggggggtatgagggatgtcagtcagaaggtgtcttctcaagactcctctgtgcctctcaggtggagacaggttttcccattgcctgtgtacacaaagggacagattattgggctgttttatttcttaatattcatttttccaaactgtacatctggatatctaccttggtttaatccttgaaatctaataagcaagaggcgatgtttgtggatatataccactaggcaatttgatattgaaatttaaaaatcatctgttctttgatttataatccattattctacatcgagcagaatgaattgaacatttcacacccttagttgtagagtgaagtaattatatttggcatggtgagttactattcccagtgttctgtgtgttgcccattgttcatgggtttcagtattattggtttttgcattttccggaaggatttccctactcatattgtaaaccagactgaactggaatgtacaatcctcccgcctcagcgctctgagtgctaggactatagaattataccaccacatctagtctctgtttcctgagttttgtgtcttccttatttttattttaaaaatggaattctttcttaccaatcccctcttctccttctcttcctccctcctcctttttctttcctgccttttattttttgagacagggtttctctatacagtcctggctgtactggaattaccatgtagaccaggctgtcctcaaacacacagaagcatgcctctgcctccagaattccggtattaaaggtgtgtgccaccatgtccagctgaaacatcttctagctaccctttcagaaacattttctcagtaaaaagctttgcaagtctttgtttcctctagagatgttttacttttgctcaagaatagctttttactgggcattttttttccaggaaaattgaatttctgtccaatcgtagagacagggatctggtatctagaagcttactgtttctttgtgctaaacttctggttctattgtttgattttcctcttggcagcttctcgggggatttccaccactccctttcttcttccttctcctccttgtcctcacatcctcatcctcctcatcctcaccctcatctttgtcctcctcatcctcatcctcatcctcctcaccctcatccttgtcctcctcatcctcatcctcatccttgtcctcctcatcctcatcctcatccttgtcctcctcatcctcatcctcatccttgtactcctcatcctcatccttgtcctcctcaccctcatccttgtcctcctcatccttatcctcatcctcttcatcctcatccttggcctcatcatcatcatccttgtcctcctcacccacatcctcatcctcctcgccctcatccttttcctcctcatcctcatcctcatccttgtcctcctcatcctcatcctcgtcctcctcatcctcatccttgtcctcctcatcctcatcctcgtcctcctcatcctcatccttgtcctcctcattctcatcctcatcctcctcatcctcatccttgtcctcctcatcctcatccttgtcctcctcaccctcatccttgtcctcctcaccctcatccttgtcctcctcacctttatctttgtcctcctcaccctcatccttgtcctcctcaccctcatccttgtcctcctcatcctcatccttgtcctcctcatcctcatccttgtctcctcaccctcatccttgtcctcctcatcctcatccttgtcctcctcatcctcgtctttgtcctcctcatcctcatccttgtcctcctcaccctcatctttgtcctcctcaccctcatccttgtcctcctcatcctcatccttgtcctcctcatcctcatccttgttctcctcaccctcatccttgtcctcctcatcctcatccttgtcctcctcacccttatctttgtactcctcgccctcatccttgtcctcctcatcctcatccttgttctcctcaccctcatccttgtcctcctcatcctcatccttgtcctcctcatcctcatccttgtcctcctcatcctcatctttgtcctcctcatcctcatccttgtcctcctcgccctcatccttgtcctcctcaccctcatccttgtcctcctcaacctcatacttgtcctcctcatcctcatccttgttctcctcaccctcatccttatcttccttgtcctcatctttgtcctcctcaccctcatccttgtcctcctcaccctcatccttgtcctcctcatcctcatcctcgtcctcctcaccttcatccttgtcctcctcatcctcatccttgtcctcaccctcatccttgtcctcctcatcctcatccttgtcctcctcaccctcatccttgtcctcctcatcctcatctttgtcctcctcaccctcatccttgtcctcctcaccctcatccttgtcctcctcatcctcatccttgtcctcctcatcctcatccttgttctcctcaccctcatccttgttctcctcatcctcatccttgtcctcctcatcctcgtctttgtcctcctcatcctcatccttgtcctcctcacccttatctttatcctcctcaccctcatctttgtcctcctcaccctcatccttgtcctcctcaccctcatccttgtcctcctcatcctcatccttgtcctcctcaccctcatacttgtcctcctcatcctcatccttgttctcctcaccctcatctttgtcctcctcatcctcatccttgtcctcctcgccctcatccttgtcctcctcaccctcatccttgtcctcctcaccctcatacttgtcctgctcatcctcatccttgttctcctcaccctcatccttgtcctcctcatcctcatccttgtcctcctcatcctcatccttgtcctcctcatcctcatccttgtcctcctcacccttatctttgtcctcctcatcctcatccttgtcctcatcatcctcatctttgtcctcctcgccctcatccttgttctcctcatcctcatccttgtcctcatcatcctcatccttgttctcctcaccctcatccttgtcctcctcaccctcatctttgtcctcctcatcctcatccttgtcctcctcatcctcatccttgtcctcctcacccttatctttgtcctcctcaccctcatctttgtcctcctcatcctcatccttgtcctcctcaccctcatccttgtcctcctctccttcatccttgtcctcctcatcctcatccttgtcctcctcacccttatctttgtactcctcatcctcatccttgtcctcctcatcctcatccttgtcctcctcatcctcatccttgttctcctcaccctcatccttgttctcctcatcctcatccttgtcctcctcatcctcatctttgtcctcctcatcctcatccttgtcctcctcacccttatctttgtcctcctcaccctcatctttgtcctcctcaccctcatctttgtcctcctcatcctcatccttgtcctcctcgccctcatccttgtcctcctcaccctcatccttgtcctcctcaccctcatccttgtcctcctcaccctcatccttgtcctgctcaccctcatctttgttcttctcaccctcatccttgtcctcctcatcctcatccttgtcctcctcacccttatctttgtactcctcatcctcatccttgtcctcctcatcctcatccttgtcctcctcatcctcatccttgtcctcctcatcctcatccttgtcctcctcatcctcatccttgtcctcctcatcctcatccttgtcctcctcatcctcatccttgtcctcctcatcctcatccttgtcctcctcaccctcatccttgtcctcctcatcctcatctttgtcctcctcatcctcatccttgtcctcctcatcctcatccttgtcctcctcatcctcatccttgtcctcctcatcctcatccttgtcctcctcatcctcatccttgtcctcctcatcctcatccttgttctcctcaccctcatccttgttctcctcatcctcatccttgtcctcctcatcctcatctttgtcctcctcatcctcatccttgtcctcctcacccttatctttatcctcttcaccctcatctttgtcctcctcaccctcatccttgtcctcctcaccctcatccttgtcctcctcatcctcatctttgtcctcctcatcctcatccttgtcctcctcacccttatctttgtcctcctcaccctcatctttgtcctccttaccctcatctttgtcctcctcatcctcatccttgtcctcctcaccctcatacttgtcctcctcaccctcatccttgtcctcctcaccctcatccttgtcctcctcaccctcatccttgtcctcctcatcctcatccttgttctcctcaccctcatccttgtcctcctcaccctcatccttgtcctcctcatcctcatccttgtcctccccttcctcatccttgtcctcctcaccctcatccttgtcctcctcaccctcatccttgtcctcctcatcctcatccttgttctcctcaccctcatccttgtcctcctcaccctcatccttgtcctcctcatcctcatccttgtcctcctcttatctttgtactcctcaccctcatccttgtcctcctcaccctcatccttgtcctcctcaccctcatccttgtcctcctcaccctcatccttgtcctccttatcctcatccttgttctcctcaccctcatccttgtcctcctcatcctcatctttgttctcctcatcctcatccttgtcctcctcaccctcatccttgtcctcctcaccctcatccttgtcctcctcaccctcatccttgtcctcctcatcctcatccttgtcctcctcaccctcatacttgtcctcctcatcctcatccttgttctcctcaccctcatctttgtcctcctcatcctcatccttgtcctccttgccctcatccttgtcctcctcaccctcatccttgtcctcctcaccctcatacttgtcctcctcatcctcatccttgtcctcaccctcatccttgtcctcctcaccctcatccttgtcctcctcatcctcatccttgtcctcccccctcatccttgtcctcctcaccctcatccttgtcctcctcaccctcatccttgtcctcctcatcctcatccttgttctcctcaccctcatccttgtcctcctcaccctcatccttgtcctcctcatcctcatccttgtcctcctcacccttatctttgtactcctcaccctcatccttgtcctcctcaccctcatccttgtcctcatcctcaccctcatccttgtcctcctcaccctcaccctcatctttgtcctcctcaccctcatccttgtcctcctcaccctcatccttgtcctcctcatcctcatccttgtcctcctcatccttgtcctcatcctcatccttgttctcctcaccctcatcttgtcctcctcatcctcaccctcatccttgtcctcctcaccctcatccttgtcctcctcaccctccttgtctctcctcatccttgtcctcctcatccttgtcctcatcctcatccttgtcctcatcctcatccttgtcctcctcatcctcatccttgtcctcctccttgtcatccttgtcctcctcctcaccctcatccttgtcctcctctcatcctcatccttgtcctcctcatcctcatccttgtcctcctcatcctcatccttgtcctcctcatcctcatccttgtcctcctcatcctcatccttgtcctctcctcaccctcatccttgtcctcaccctcatccttgtccttgtcctcctcatcctcatccttgtcctcctccttgtctctcctcatcctcatcctcattgtcctcatcctcatccttgtcctcctcatcctcatccttgtcctcctcactcctcatcctcatccttgtcctcctcatcctcatctttgtcctcctcatcctcatccttgtcctcctcactcctcctcatcttgtcctcctcaccctcactcctcaccctcatccttgtcctcctcctcatcctcatcatctttgtcctcatcctcatcctcctcatcctcatccttgtcctcctcaccctcatccttgtcctcctcaccctcatccttgtcctcctcaccctcatccttgtcctcctcatcctcatccttgtcctcctcatcctcatccttgtcctcctcatccttgtcctcctcaccctcatccttgtctctcctcactcctcatccttgtcctcctcatcctcactcctcatccttgtccctcctcaccctcatccttgtcctcctcaccctcatccttgtcctcatccttgtcctcctcatcctcatccctcctcaccctcatccttgtcctcctcaccctcatccttgtcctcctcatcctcatccttgtccccttcctcatccttgtcctcctcaccctcatccttgtcctcctcatcctcatctttgtcctcctcatcctcatccttgtcctcctccttgtcctcctcaccctcatctttgtcctccaccctcatctttgtcctcctcatcctcatccttgtcctcctcaccctcatccttgtcctcctcaccctcatccttgtcctcctcaccctcatccttgtcctcctcatcctcatccttgtcctcctcatcctcatccttgttctcctcaccctcatccttgttctcctcaccctcatccttgtcctcctcaccctcatccttgtcctcctcatcctcatccttgtcctccccttcctcatccttgtcctcctcaccctcatccttgtcctcctcaccctcatccttgtcctcctcatcctcatccttgttctcctcaccctcatccttgtcctcctcaccctcatccttgtcctcctcatcctcatccttgtcttgtcctcaccctcatccttgtcctcctcaccctcatccttgtcctcctcaccctcatccttgtcctcctcaccctcatccttgtcctctcctcatccttgtcctcctcaacctcatcttgtcctcctcaccctcatccttgtcctccctcatccttgtcctcctcaccctcatccttgtcctcctcatcctcatcttgtcctcatcctcatccttgtcctcctcaccctcatcttgtcctcctcaccctcatccttgtcctcctcaccctcatccttgtcctcctcaccctcatccttgtcctcctcatcctcatccttgttctcctcatcctcatccttgtcctcctcaccctcatctttgtcctcctcaccctcatccttgttctcctcaccctcatccttgtcctcctcaccctcatccttgtcctccttatcctcatccttgttctcctcaccctcatccttgtcctcctcatcctcatctttgttctcctcatcctcatccttgtcctcctcaccctcatccttgtcctcctcaccctcatccttgtcctcctcaccctcatccttgtcctcctcaccctcatccttgtcctccttatcctcatccttgttctcctcaccctcatccttgtcctcctcatcctcatctttgtcctcctcaccctcatccttgtcctcctcatcctcatccttgtcctcctcaccctcatccttgtcctcctcatcctcatctttgttctcctcatcctcatccttgtcctcctcaccctcatccttgtcctcctcaccctcatccttgtcctcctcaccctcatccttgtcctcctcacccttatctttgtcctcctcatcctcatccttgtcctcctcgtcctcatccttttcctcctcactttcatccttgtccttctcatcctcatctttgttctcctcatcctcttctttgtcctcctcgccctcatccttgttctcctcatcctcatccttgttctcctcaccctcatccttgtcctcctcaccctcatccttgtcctcctcatcctcatccttgtcctcctcaccctcatccttgtcctcctcatcctcatccttgttctcctcaccctcatccttgtcctcctcaccctcatccttgtcctcctcatcctcatctttgtcctcctcatcctcatccttgtcctcctcaccctcatccttgtcctcctcaccctcatcctagtcctcctcatcctcatccttgtcctcctcaccctcatccttgtcctcctcaccctcatccttgtcctcctcatcctcatccttgtcctcctcatcctcatccttgtcctcctcatcctcatccttgtcctcctcaccctcatccttgtcctcctcaccctcatccttgtcctcctcaccctcatccttgtcctcctcaccctcatccttgtcctccttatcctcatccttgttctcctcaccctcatccttgtcctcctcatcctcatccttgtcctcctcaccctcatccttgtcctcctcatcctcatctttgttctcctcatcctcatccttgtcctcctcaccctcatccttgtcctcctcaccctcatccttgtcctcctcaccctcatctttgtcctcctcatcctcatcctcgtcctcctcttcttctccttttcccctccaataccctaggctgtcttggaacttgctatgttgtcaagaatgaccttgaaattctgatcctgccaattccagctccagagtgctgggattgccacatgcatctcatcagatagccaattgtctggcattatcgatggcacggtcttctctcccagccaaagcagtcataagccatgtgagtgtgtatagctgaggccatgtttcttttcccaagtcttatgtgtttgcctttgcatagatactttattctgattgcctttgcatagacactttattctgtttgcctttgcaatagatactttattccatttgcctttgcatagatactttattctgtttgcctttgcatagatactttattcctgtccctttgaagttgattgctgcactttgaaaattggcaggaaatccctttcaagattgttctccaaaacattcttgggtcattctttgtgcttccatataaattttaaagtcatcttttcaaagtttaaaaaaatactgtgatctcaacattggttaccctgacactacagacttaggggcactaacaacctaagaacattaagtttaaaacacaatatatattttattgtatttatttctttaatttcttttatcagttctggaagaaggggagtcagtgtcctcagctgctacccagaggtgagcccatcaggctctgttggatatctccaaacccatagtcacaggagagagcccttgttaaacttttgtgacctaagtgggtcacacagcaaaacaaaaaggcatcagtgtgggaaagagatttgtagagaagaaggcaggctcacaggggtgggtgggagattagagagggtggggagagagagtaattaattagaatatattatatacacacatgaaattgtaaaggaacaaatgtaattaataaaaacatataatttattttatattgacctttcccccaatgatattgttcaattaagtgagttaatctaatacttcatggatagtgttgactttgtgaatatgtaactatgccatttgccaaaagagatggctttcccttggctctttctctcgagctatactgcagtgttaactggaaatggagctggtgggtagtcttgttggagtctcagtggtagactggaaagcactttgatagtgagggcgtgtctctcatgcgaggtagagtgattgcatctgaccccgtgcaatgtatggaggcaacaatcgcattagcattgctggggccctgccaagcattacatcagagttaggacctctgtcttccagcaagggaggaaggagagatatttattaaaactactgttatagatgggaacctggtcacagcattaaatcaaaacagaatcggaacatcctacctagtgacagctttggccattcttctgcccccagctctcctgggagtatatgcaaataggactgtgcttggattctggtctcttctggaacaccatctgttttcctgcaccggtggtcttttctgtggtgctattcacagagccttctctcctcaacaccaagaggagcatgggtcccatgtggcccctctgccccacttgtggcatgggaatgtcaatctttgtcctgagtcctttgtaactatcatttccatggagagggtggctatagctggtccttggctgacttccacgaacggattattttataacataatgacacctctactttttttttcctgtggtgacttaatagatcacttatgaaacctaataaaaatcaccctccccccacactatccctggggagtgggtgggggtgggttggggggtcagtaggaagcatgggaagatgggagaagggggatgggggaatcaatacgtaaataagagtgcttctaaaataaatttaaaaaataaagatagcattcaaagtaaaaaaaaattactctcctgtttttcactttgcttctccaagccatctgcatcagcctcagtcacagtagtgtgtgtgtaaggcggggaggggagttgtgttagcaagctgatctgaatcagagagatatgtcagaagatgggttttatggcagctgtcccttttagtctaactggagagcaagcctgactgtcatttatcttgtcatccggcattatcaccaacatctctgactgtgtcagttcttaccacccctgccgctgggccccagctctggcttcctcctctctgccctggattcccatcgtagccggctaatttctgctgtcactttttctcccctcacagccagagctagtgatctcactcagtgtattggctgcttttctattgttgtgataacataccgtggccaaggcaacttagagaagagtttatttgggcttctggttccagggggctggggtccgtcatggtagagaggcatgcagcagggatggcaactgatgccgagagctgggcgctcacctcctttgctgcaagcaaaaagcagagagtgaattgcaagccgtgtgaggctttcaatctcaaggcccatccttagtgacttattttctctagcaaggtgcgccactgaagcctccccaaagagcgccaaccaaaggaccaagtgtttaaatgccagagcctacagagggcgtttctaatctaaagcaccactccaggaggccctcaccatctcccatcttgctgcacatgacaatactacctggctctctgccaggttccacgtcctcagccctttgattaaaagtcatcccattgggttttcctcccgtctatcccttgcctgactttatgttcaccatagaaataatgttgacttgttttgttgtttctggcatgtctccctagtctagcatgggagctcctctggctgatggccttatctcgggcagggcatacggagcttgtttgtttagtgtgtgccgggtgagagatgatgaatcacaagtgatatctagaaatagtggcagtctccagagggaccaggtaaaggagagagtgggcagagacactggggatcagagccaaggctgggagactctagggtgtaggccgacatagaacaaataagaacagttgttgactaggcagccaacagtgggctccagaggctgcttcctgcccagctgttatgtctgtatgcttgtctcttaaccgtgggtttctcgaggtacttatcctttgtgaacagaccgtgttcacaaatatttctggtgatgaactgagtgaatagggggtgtatcccaagctgtctcagttttatgggttgaactgtgtttcccttaaaatttgtagacagaaatcctaacccccaccagctcagaatgtaactgaacttggggattggctcctgaaaatgaggtcattagactgggcctgaattcaatacaaattgtgtccttatgaggaggtaacacagagatacagtggatctgtgtttcctatggtttgggtgtaaaatttctccaacatgctcatgtgtttaaaaacttaatactctctctgctaattgcactgtttgaagaggcttttgatctcttaggaagcggggcttggctggctgaggttggccattgggaagatgttagcaggagtgtgagggttagacctatccttttgaagtagactcaggtagaaaggaccaattagatactgatttgttgatttctttagtggttcacttaaagcactgtttgttctgcctatttgccaagcatgacttcatttgctacccagaacagaatgacctggagaaacagctagaacagtgggtcattgttctttatgacctgctcattgccattatgcttctgtaaaatcttgcttgcttgcttggccgccccgccttgtggtttagaagagaaggcaaagatacaaactagatttggcattgaggcctctcaggagctgtcctggatttggtccactggtgacatctctcttccactctcattgttggagtgcttattccaaaaggattctctcaacgtttctgttcccatcctttgcttcctgatccaccaagatttgagcagcccctgcttcattcttctgccaccatggactccaaaacgacatgccccagtcatggtgaactgaaaacataggccaagtcaaatccttcatcccttcatttgcttccatcattgtgttatcattgtgttgagaaaagaaaacgagagtccaaggctccaagatcctctgtagagatcacaatctgatggaaccacggtggtttgaataagattgactcccataggctcatatatttgaatacttggtccccagccagtagaactatttgggactattaggaggtatggccttgttgagggaggtgtgtcactagggggtgagctttagggtttctaaagcctacaccaggcccaattagttccctctgcctggcactggtggatcaagatgctaactctcagctaccggtccagcaccatgactgcctgcctgctgccatgttctccaccttgacagtcatggactctaatcctcgggagccaaggctttcttttataggttgctttggtcatgatgttttgtcagaggactagaaaaataactgagatggtgctcaagtcccttctttgaaaggatgcaagatttgcagataaccatcacacatcctaccggtctacttcttcatggcatctaaatcatttacagcgcccaacacaatggaataccatgcagatatttgctttgcatcattagggaataatgacaggaaaagaagtctgtgtgagtttattgacacacgcttatggtgtcatagggttggctttttagcaaatattttggtccacagttggttgaatctgtggatattcaaccctttaattagaaagggaggtctaggggctggagagacggctcagtggtacagagagcttgtttctcctgcagagaacccaagcttggttttcagcacatacagcaagcagctcccaaatacctgtaatctagctccaggggattccacatcctctgctggccttggcaggtacctgaacttgcatgtacatatgcacacagagacacatgtgtacactcataattaaagatttacaaataaatatttgaaaagaagggctttctctgcagagagatggccacgtgatgatccagaaaaaagaagagccatctacactcaaggacagggacctcagaagaagccaaccctgatgacaccttggtctggagagtctagctttctacactgtgagaaaatagatgtgtgtgcaaacacccaatctgcagtaagcctgcaatagcctcctatcaaactcagatgcaagtctagcactaaaacagttcatgatcataaagccactgttcccccaacatacccaccctaactgttctccactttctccgtttcctgagagaccaaagaggctgttttcccaccgaagcccaggtgctgatgctgcctcttgcatctcaggttgtggtgacatctccctctgaaggcgatgctaaagttggggcattgacaaaagtgctgcttgggtgggtgcagtcatctttactgtcctctggggtacagctgtgggctagggtgccaatttaaggcacagggtccttgaggtcacctggctgctgccaccatccccacctgcacttgctggtggttgaggctggtggccagcatggtgcgtacatactgcttctatacttacattgtcccgtatttggggcactcagtgaggatgagtcagtgagagtgagacagagaacatagggcaccatacaccgtgctgatggcaaaccaactgttttctccaaatttgggaaaacaatattcctatgtaactatttttatcatgttcctgtttgaaaacatacacacatgacataaatcaaaaagtccagtgactagagagttggcttagtggataaaagtgcttatgcctccaagacaggccacctgagttcaattcctgaaacccacatggtgagagaagagaaccattacacatgtggtgctctgatctgatctccacacaagcaccatggtgagtgcacatgcacacacacacacacatacacacacacacacacacacatacacacacacatatacacacacacacacacatacacatatacacaataatacacatacacacgcatacacacacacatatacacacatacacatatacacacatatacacacatacacacacaatacacacacacatagacacacacatatacacacacatacacatatacacaatacatacacatacacacgcatatacacacacacacatatacacacatacacatataaacacatatatacacatatacacatatgtacacatacacatacatacacacacacatacacacatacacatacatacacacacatacacacatacacatacatacacacacacatatacacacacatacacatacacacacatacacacatacacacgcatacacacacacacatatacacacatacacatatacacacatatatacacatacacaatacacacacacatagacacacacatatacacacacatacacatatacacaatacatacacatacacatatacacacatatacacacacatacacacacacatatacacacacatacacacacatatacacacacacgcatatacacacatacataggcatacacacacacatacacacacacacacacacactcactcacactcacattcacattctcacactgtttcttgtctttctatcatttctggctgtagatggtgcttcaggaaacacttcatccacggtgctttggagaagctgctgtcatttcattcagacttagcaccttcaagcaacatttgtgcatacaaaatgaagctaatcaccggttccctccagtggtgtcatattccgtcctgcacagttccatggatagtcacaagccatgtggaactttcaatcatttaaaaggaaacaagtgagatgcaattttaagtttgttttcatgctagtcacgcgtggctggcagctgccgcactaacagcacaggtctacagcggatgctctgcattttagcacctacagctcagtgagctgcacatggtctatctgaaaaagcactctcagaccccaccttcttccccatgtcctcacccaagtggatcctaatagtaacattttgttacttgtgtgcgtgtgtacagttgagcatgtgtggagcatgtattcattagctgactgtatttcctctcctgtgacttcattattcctttgtactccgagggaggggttagagtgctcttcttgattactgagagcacttctgtgtatagatatttgtgatcctgctacccacgacacagtcttctcctgcccatcacagaagttccctgtgatgcacgaacaagggtagtttggatgacccctgaggacatttctagcttcattaccaagtccttgtcctttcactttgtcccaggagagtgcccagggaccagcagatacggctttgtgtattcatatttgctgacggcctcgggaaggccccttgctctgactttctttatccatatgtaggataaggtcacaggtaatgtgtggctgtggcgaggtgtgtgggacaccgtaaaggcctggctcatgtgacaagaacctggctgtgtctccacatggaagtcaaaggaactggagacttatccaagaggtttccaggaactaaactgacctccagtccttttggaggagggttcctagcttctaccagtgatgggggacatccttcaccgaggtggggatgactgcagtgtgacctgggcatctccaggcttcctgcctgccccaagtacaaacgtttcagttatgaaggcaaatggcaatcttgtgacttccagtagatcgagaatgatccacactgggcgttctggggggtgggggcaggtggtccagagacaaggagaggtctgcaggccacaccatggtctccatgccatatctagatgattctcagagcatgcagatggctgtgctcctaacgtctgtgactttccctcaataacctcacatctttccccccaagacgactgcctagagtcagaacattgctttatcagaaaggccctgattttactatcaagtgcgtttggtttaagtggccatgtctgccaatcagtggctggaagattgacaggatgctgagcccctttgacccgtcctgtcctcctctttgaaattgagctgtcagttcctactgctactgcccacagagctgaagagtcaaagcaattgctaacataaacatgcaatcattaacataaacactagcaaagagcctggcacctggggagttgtaattattattgcacaacaataataattgatgtgaagatgattaaaaatgcaacccctgctgcccagaggcttagcctgcttgtgagggaaaagaggctctgacaatggccacaaatatggggcatccaaggagcagctggtggaagcctcatctggcagtttgggctctagaataaatggtggcttaggtcacaataggctcagtcagcttctgacggggcccattaaacagcaagaccatggcagcttcctgccggccgcttaccttccactcttggagatcccctggtctcaccctgtctacctgaggccacctctagctagtgctctagtgctggcccacagccttgccccaggctagaccccagaagatggactggaattgctaacagagctctcccctggcctccgacccccagctgcagacatcatcttagaaggttcagcctgccccacctgatgccctgctcacaagtagcagaattcttagtgactgagaaggggggtcctccaaaaggaactgctggatcctgggctccatcctgggtcagagtctgtcttctgagatgccatgcctcccctggaaagcatgtggaactctgtgagatgtgataggaagaattgccagccacgtagacgaacataagcacacactgtgtcttcaaggggccagatggtcctggattcagccccgcccgtctccttgggcatcatggctgcagggatgggagtgggttgagcctcaagccccacagactgtgagtgactccaggtgaagctctaagaaaagcagaaaggaaggcgttatcaaaggcccccagatttggcatgagaaaaggactttctacaaagggatggctttttaaaacactttaaacttgaagtctggtttagaggcaagtgctggctaaaataagcattagccaattggggaacaggcatggaagaggcagaaagggtgccgtggctctcactggggcagctgccttgggtgtctgcccatcagagggcagaggggccactccagcttctcaccatggaaaccatgtttccccctcagcgtcaccagatttctgctcagctcaggctttgtctggaattttagggtaagctaattattgtgaaactctatgctgagttaatagacattgaattagaagtaattggattaaaaccacttttattgagttcaaaaaactgattagcgtgatcgtctttgcccagtattttcaaatcattgaaagcatgctctctcctttaatcaaccttccaggtttgttgtattaaaggctctaaatcagtcatttatcagtgcctttgctcatggacaacacacactgagtctctgtgaggctgagcccagacgatatccgagaaagtccagtccaccagatcaggaaacccagtggtccacctccaatggaacaccaatgagttcaccctacagtgacctgcctgggaccttccttcacactcatgcaactggtgtggtcagtttgtggaggtacaaagaaccaatcacagaaaaactaagcccatcaggtcttttctttaaggatttgacaattcccaagctgggcctagtgacacacacctttaatctcagctcttgggaagcagaggcaaagggatcttcaaggccagcctggtctacaagagcaagttccaagacagtcagagctacagggagagaccttgcctcaaaaaacaaaacaaaaattgacagtcccttgttctaattctcaaagacactctctctttaggctcatgtacagaatggaatcagtaaaaactccaggtccccagaatactgtccccatagctggatcatttgggaagctgagtgacctatagaagcaatctttaagtttgggtaaagagtcaagaggactgtgtgagaaagtttaacttgaatggtgtcagaccagaattaaaccagggtgaaagcagttgttgctagtaattcttggcagtctccaaaaagtagtcccatttggcttactagttgtcatcatcactgctgagcacatagtaggtggtcaataaaaactattaaatctatgagtaaacccaagtagggtgatccagatccctggtgctaagaaggggatgaccatgtacaatacttattatggtcactggtttgaaatgcaatggtgtgggttaggcatgaaggcaccatctcagtcctgagtgacaaatcctgaattaggagatatgcttggagggccagtaagcatgcaggttgggggccagtccccaccctgggaccccataaccttggaagctattgttatgtctctattggggaaaattgccagaatgttcagtcgagctgtggcttgccacagatcagagaccagggctactggccccaggagacccaacgcaacacaccagaaatccaactttcataaatacagtttgataactcaaactttttgtccccaaaagctctttgttaacccacaaaatacttatcaaacaactagattgctggctgtgccttaatatttctgggcccttgaaaggagacagaaaaattcttctaaaagtcgtcaagggtcagagaggtggctcagtggtaaatatacttcctacaaagcttgatgacctgagctcgattcctggtacctacatggtagagggaaagaaacagctcctacaagttattctctgaactccaaacatgccctgtggtgtgttgacgttttgttgtgctctaacaaataaagcttgcctgaagaccagagaagcagagcagccagccactagagttcttacctctacaaaaatctcagacccaaagaggctgagctcctgtctcctcccaccttatattcctctctccacccagtcatatcacttcttgtctccactttcctagtcctgagattaaaggtatgcccttcccaagtactggggtcaaaggtgtgggtcacactgcttggcctctatggttaactagggtggcttgttccaccctctaatcttcaggcaagctttatttgttagagcacaaacaaaatatcaccactctgtggcacatccctcctcccaaggtaaaataaatattttgaagtcacccaggtttctcttccctaacacgagaagcagatggtacctctgtggccaagcatgcctttctcttcatgtatatcaggtgcatgttcattcttcatgtggcaaacagtgtaaaactgaagcaagcaccacatgactgttggtatgtatctgcttaatgatggaaaaacctaatttttatttatttattttttacagtagagaaactaaaccaaactaggttctgagaacctctggcatagaagaggcaaaattgcaaaagggactccaagccaggactgaacatcatttcccaaggtcaaggacatgtcactccacagctcatgagacttctttctgggtgtgtgacagtgggacagtctttctggggagccatgaacaaatgtctactcatcccagatagggaaaaaattacatcaaagtccaccttggtaaaccgatgagtttactgggcttactaagggggaggggttacaggagtaactgcattgctgaaaagtctatctctcctgggtgacaactcacaaaagccaggaccctggaactctgcatgtcctgtaggcagctccacatatcttcgagtcctctcctaagtaggcctcacagcttcccttgagaaggaggggccttatgattctggtctgtttcagggatttcctgagatttctgacttgttttcttcctgagtcttaacaagcttccttcaggaatgaaatgtttaaatttggagggtagagaggctaccttaagagctgaattttcttcactgctgggagcggctgaagctgagtgtgaggtagacagccaccctcccttgtctggaggccttgaagtccctctcagagttgtaataaacacaccctgatttccatggccttcccagagatacatgggtcgcccatggagctggttcaagggtcccttattgtctcatttaattcccttctagtgcagagctccaatctcacaagactcagggaaatgaggggaaaatggcaagttggtgaacttggaacttttggtcagtggggaggggggcttgatctcgtaaatcttggtagagaggatggtttgtctagaaccatactcattgttctcctcattccccagtgaccaaggacatatagctatgacataaagtcaagggattatatgacccttccttctttccaccacccatccatccatctatccatccatccatccatccatctatccatccatccatccatccatctaccaatcatccatccatccatccatccaccaatcatccatccatccatccatccaccaatcatccatccatccatccatccatccatccatccatccatccaccaatcatccatccatccatccatctatccagcatttattgaaaacccacttcgggccaggtgttgtgttccaaaagcagtagctaaaacaaaatccccaggcaatctgatgttacacaatagccaggaacctggatgatgagcaatggtgagacagcttctttttacagtccggagctctcacccccagaggttagtcttcttcactctaacaccagctgagagacccccccacacacacacacctacttcagtagggagtttgcacaccctgcactttagctgttgaaaagcctgagggggccctgaacagccgagagcgacctggcaacattcccttcagcttctcatcctcttggctctccccactgcttgcttagggttcttgctttccacgggtgcagacattctgtctagggggtgtggtgggggcttctggagaggggaggcaagtgtgaaagagaagttaagagtcctggacagtaaaattccagggctgagttcaagttcccagaatagcagtggacagagagctaacttcctggcttcagggcggtccccagcgtgttgaatggagctgttggtttggtgggtctagagggcgtgtgtgttcaggagggtggtggcagaggtgaccacagatgactgggaccctggagaaggaagtccccagagtggtgaccacagccatgcattgcaaacagcctacaccctgtcctccatggtcagttctttctttagaaagagatgttttgctttgtgtgggattgacaagacggcaatcgacaagtcagtcacggtctttgcagggcttgtgtgacgtgggcagagagtatttgtggacaagggtgtgggagcatggtgtctgccggcagctggcaaaagggaggcaggcgcctgagtgaagggctctgttccagacacaatggcgttcttattcatctcccctccacagaagagccctcagttcatcggcagtgtgttaaagtgtggagaccaacaatcagcccattctgtagatgggaggtgtttttcataatttcttaggttccgtaaacacgatgtttctctcttgatgaagatatcagagacgtggaagcaaaaagaagcatttgagtaaaaactggcctcagggagtgaattagcttaccgggagaggactggcgaagccaactgccagagcatgctgtggacaagctttcctgctacctgctatgctcaaaggctgcaaatgacttgctgtgtgaactagagacagtcttcctcttgcaggacctcagtttcctccgtcagtagttccttctacaaacatgctaagagaattgggacaatagcaagcagagacaggacagttggtagagtgcgtgcgtagcttgcatggtccctagcactgcataaaatgggtgagatgggtggaacgcctgtaatcccagccctgaggaggcagaggcaggaaaaccaggcattcaaggttgtcactagtctcactgcagacttggaggccagttggggctacatcagaccctgtttcaaacgctgggggtgggtcaaccaaacaaagtattgataccaccttagtgcttaggaggtgcctggtcttagcattgccaatttcggcctggtctcagtgccaaggcacactgaggtacacttctcttcttggggggtgggcctggagaccacaggaccttcacagcttccccttctgtttccctttgcatacaaagacccattgcctgcaccctgccctgcatggtggtgactctcggcagacatttctgcaattaaatggaagtgagcacacaagtgtgggtttcatgagaggagtcagtacagatggcactgggggtgccacccctactttatggggacagggaaccaagggtttctctgggtgaagccattagcttacaggggaccacaagtcaggctaaagattgaattgggctcccatttaaaaatctcttcttcggggtggagaggtagctcagtagtttgagttcagttcccaaaacccacactggggagttcataaatgtctatatctccaattccagaggatctgacgccatcttctggattctgtaggcactgcactcatgtgcacacacacacacacacacacacacacacacacacacacacacacacacacacacacgagttaaaacgaaaataaaatccttaaaaaattgtctcccccctccatggtgacctgtatagttttccattctcattcttttttgtgttttaaatgaaaaccgcacaccttgggcctaagcatctcttcaggttggctcagcatcgcttgtaactgggtgatggctggggagcatgtgtcaggcttgccgccatttcctatctccatagtaacaatacaaatgctgttatttccacctcagtgcccaggaggctgaacctgagagacatagagtagctgatccaagtagagcagctggcaggaggctggctaggatttggacttagactgggagctgggtccatgtgcttctcacagctccacggcaagttctcacttgtaggacctttcctcccaactctgaaggtcgccctgggcattggggtgataaaagcatccccttgccttgagaagccttccacacaacaggtagcacccagcatccgagcacagcagcccacagttctgcctggctctgccgtgcttggcagggcctgcacacagtcattcttgatactggcaatgtcaacagatcacaggttaatataattattattgttacttcaatcttgatttcctcttgccagacatggtgtctcaacaggagagccagctttcctgtttgcacacgggtgactctcaggactcggcttatggaactcctcccagaccccctcatctccttgtggtttggaaagattcccttttggtctttagagatgactagggaatgccaataatagccgctgtggaaggaaggaagctgcagtgacccggtgtttggatgccgctgcaccaagagatgggctctgctccagaaaccccagccagcttcctgcccaatgctgtcctttaaccctcagttggccttggcccggagctgagcactgaggtgggcaggatagtgggatcatgtcctggtttggctgtgtgactactagcccctcactcacacagcatgtttctaggtccaagcgatggtcagtggatctgggtgtggccctggccagggtccatctctgggctccaggataggtccaggtctttccctctgagtgtcgtactccagttcatctgaattttagcttttcacttgctgagtggctgtgatagaaaacactacttccctctgggctctgagagcccagagggagctaactagtctctctggccagaagacaatggacaccagtgggagagctacgtgtggacacatggctaagaaagccaggttgtgggaagaatcatagtgaggccaacacatttccgggtcttggaccgcagccttggtgtgcaggggagcagggaggtttgcagcagcaaggcatttctgggaggcaggtgggctatggctccagtccaggggtgctttttctactccccactgccagcaaccctcaagccacacaccatacccttccaagaagatccctgtcttcccagctccatactggggtggggtagcagtgtgtggaggaggatggagggcagagggagaaggaatggagggagggagcgaggaagggaggaggggatagttgcttttgagcaggttgagatgaggtcatgtctgtaactgctcctgggagctgatgagacagacacaggcaggggctgcgggcagcaggctcttccttccagtaccgggagagaccctgggcctcaaaatttctgaggtcttcagggaaccttgagtttcaactctgaaaaatccactagtgacctcacctcgaacatctcagctcctcaggtagctgcatgtttccatcagacctgggccgaatagagacaaggaggagaggccaagaaggaggtggctgtgagcctaggccattcagctggcagagaatgccagagaacagcaagggcaagttgtggggctggtctagctgaacatgggcaatggcagccaacggccaggggaagggaaggggagcttctggcccagtgtccctcttccttcagacaagacagggaggattaatatccactgttctgtagaaagaaaattgtcaggggctggacattctctttctttgtccacacctgtctgtaggtgaggagggactgctcgattggcaggtagagggacatgtgtggccaggaagcagggttagctggtgttacctgcggagcacaaaaaaaaaaaaggctccgaggctgtctgtgtccatccttctccactgaagtcttcagctggagagccagggtcgtgactgaggaccctgaagactgtctaacacagaagccacttgagtaactgggcctagcggctggagcgatgggactttacagttggtagtgtagtcaaatctggagactttccggccatcaggattcccggggctgtcctggcttttgcttctgacttgctggtggttatcaggcccaccctcacagccaggagggatgcaacaggagtttgggcaagtgctgctcttgcactggcccccagagtatggaaagaaaagactctctgtcaaccagggttgaggccaagtgagggcactcagcttgtgagttaacttacagttcaaggtcaaccaggtttaaccctttcctttctgtcaccctgtattgtctgtcttcacttctagttaccacaggactctacaaaaatagcaaaagatccatcgcactttctagcatattctaagttccctgcttccagacgtattgtccaccaaagcctacaggggcctgtgggacagcctgtgctgcgggccattgtccttcctgtgcccagagtttcccagggagggtgaacttgtgctccgcagacatgtgtgaagacggtctgcgggggtgctgtgtggggtttacatgtggtatatgtgctgtgtgctgtgtatggcactgtactgcaggagtgatgtacatgtgttgtgtatgtctgtgtatggtatgtactgtaggtatgtaggatgtgtggtggctgtgtaggtgtgtgtgtatgttgtatgagtgggaacatgtggtatatagtgtgttatataggagtggaataatgtatgcatgttggtatatgatggatatatgtgtatatgtggtaggtgtgttctatgtacacaaaaatgtatggtgtaatggtatatacattgtatatgtgtagtatatgaagagttgtatgttattgtatgtgtgtgattgtggcatgtgtgcctgtgtatatctatatgtgtttctgtgtgtgtgatgcatgtgcatatgtgtgtatgtgagtgcctgtgtatatttgtatgtagtgtgtgtgtccgtacatgtatgtgtgtatgtacatgtgtgtgtctgtgtatgcatctctgtgtatgtatgtgtgtatgtgtgtctatctctgtgtgtagtgtgtgtgtgtgtgtgtgtgtgtgtgtgtgtgtgtgtgtgtgtgtgtgtgttgccctcctgcagtcatctggaggagtaacagaaggaacatgggtggaggttgcaggctgcaattccagccagatggttctgtctgtgaaagccggtgtctgtatttttgtttgttttagtttgttgtttgtttgagtgacttgagcacacagggatttttctccttgaggtctggacatctgtgtctgtgctagttttctagagtcctggggagaagcaggcccctgggtttagaccagctgggtgttggtgagtgtgaattctaacagccaggctcaaagccctgggccacttctgacgtcagatggcagagacacgctaaatgcctttgagtcgtctggatttggaaggctccaggaggttttggggtgctgggagacagctaagcctggaatttaagcgtgggtctcttggtttctcctcccttggagtcggaggcagccttggagaagacacctgagcttggggcggaggatgtggctcagggctgtggtcctgcagcgccacctgggggcaatgaggagaatggtcgcagaggctcccagaggatgtacccattcaccagtctggcccctgaggtgggtgctccggggtttcctcctctccagtattgacttcaggggacatgctggggactctgaaagcgaagctttctgttgagggacctgaagtctcatttctgacttccctgcctcatctgattaaaaagcctgaggttttggaaggtgctggaaggttctgaaggtcctttttgaacaaggcacttggtcaaggattgagacactgggccccagggtctgagctcagccaggctgtttagacaccaaagatggcctctgctggagaatctctttcccactcaataaatcctgcgtggagcagatgataacggttgtcagacaacgaggtgcggttgatggattgtaacattttagagaacagcgagttcgtaacccagaccctatgacacagccttggagccagcaccatgctgggagacaaataaatggtcccttcagaggagggaaactttgcagggtgagtgtctggggcaggagcaggtcacgtgaggtgtgcaggcatgtgggagagagctagggcctgagaaactcagcagacagggaagggcagctggggacaagatggagaggaccctgtctgcgtaagcctgtcccagtaaccacgttgtgtgacttcctggacaccaacaaagtggtgtcagtagtgggtttaaaacccagaaacaacagtcactgccccttgtcaccgaagatttgtggctactgatagcaatggcctgagagggcgctgtgactcttggtgttctgttaaaggggagtgacgtgtgtccttgttcaggatgagacaatctgtatttctagggcactgccgtggcaggtaggaggactgcctttgggggggaagggaaagggacggagcttcagtgactccatcaaggacaagcggggctccagaagcaggatgggtgtctgtgagtggaatgttactagcagggcacacgagcctggacgattttgtcagaatgactgggtaggattcttgctaaagacaagcttgaatgtgaaggctctcaaccgggccccaagcagggactaggggccatcttctccaaacccatgtaacagcaggcttttgctcagcctggagagggaaaccagagcttggccccatggagcacaggattcagaggcacgagaagaagccaagagtctttgtgggtgctcatgttcaacctacaggctgagagccccactgtgagctgaagggacagggctgttctcggtgcacatgtgccgtggggaaggaataaatgcaatactcatgcagtgcggattttatgttcaatgtatttgaggagcaaaccgtcatttttgtggtactttacaatttgcaaactattgtgtatttattagcttgtgctgggaaaggagcgtcctgaaccagcaaagtagcctgggtgtgctttaaataaacaacctaaaaccatatcaaaagttacatgcatttcatctatctgtcatctagctagctagatagctaggtacatcaagacagagtcttacatagcccaggctggtcttgaacttgttatatagccaagaatgaccttgaactcctgatcctcctgcccccattacctgtgggctgggaatacaggtgtgggtcatcacacatggtttattctgtgctgggggatcacacctagggcctgctgtatgctacgcacacactctaccaactgagctccacttgtagatcttgaccccattttacacacaagaaaactgaggcctgaagaagtggggctggccgtgtcaccgagccgagtgtcctggctgtctcggccatctgagcacatagctataacaggtatcacaacagccctggcaagaagaaatggggccttggagaggtgaccggctccaagtgtgattatccccccgcccccccagcccagtccctgtgtcctactgactttctggagctttctctcctcaggggatgcctcacacaagttgagtttattcactcatgtgagacatctcttgtgtgacatgaggagacagataaaccaggtgatgctcttctctttttttgtcatgaggttggcatcagagccttaggtgtattctcaggtgttttaaaatggagagctgtgggcctgatggtggtggcgcacacctttaatctcagtacttggaagcagaggcaggcagatctctgtgagttggaggccagcctggtctacagagggagttctaggacagctacacagagaccctgtctcaaacaacaacaaaaggggggtggcgtggctgggagctttggagttagaacttgtgggtacttttggggaattaaatccactggcctcctcatcccttcctcaggtgtgcttttcaaatgcagatttcaaacgtcagtggcccagaaacatcacctgtccttgtctccagagcccaggaaggctcccgcaggagcccaggtcttcaaagctcaggggtgggagcgttttcttttcccatcaggctgccattgctaaagagctgcctcgcttctggcttctttttcttcagggttatttttaatgaacggatcgactacacccccaaagctgctagcctggctcctctaatgagctttgctgaaagtcagggtagcccctctgtgggctcaggatgcagggtttctccgtttgtcaccgctgtggcctttttctttccagccagctgcgtttacttcttcaaagatgtcagccccagtcttgccaagtttgggttttacagttccatggatggtgacttaacgtaggtgtaaaaatagatccgtgtttttcttccttctctttaaaaaagtgaggaggtgggagggggggtgtgcgtgcgtgttttccaacatctcatcagtcagaaacagttgaagcaattttagctcagtttttttttcttttcccccaaaagattccctccaagcctgacacagatgatggaacacttcaaggaaaattttctttccaaagaagtcaagtgcaattaatgaggagggagctgagggagaacggaattccagagtgttcgccgtaatgtcaattatgtcactgcctgataaacacataaatgtgcgatccattggcggctcccctccaccatgcgggctcttacaagaagtgaccatttctttccattacagacctggaggatttaattctcccaactgaaactataaacaagatgggcttttatatgtctgtctgtctgtctgtctgtctgtctgtctctctctctctctctctctctcactctctctctctctctctctctcacacacacacacacacacacacacatacacacacacacacccctgatagagaaagtttatttaaaacacatgaaagtcaggcctggtgatgctagcctgtaatccctcctacttgggaagctgaggcagaaggattacaagttcaagtcctgcctgggcagcttaatcagacactagctcaaaagggtttttgttttgtttgttttgtttttgttttttcagaggacaggctgggaatgtagctcagtgttggaatgcttgcctggaatgaaagagaccccatattcaatctcctgtatcataaaaaataatagactacataaaatactgaggtagctcaggcacagacacattgctgtgtgcagaaaggaacggggctagaacgccagggcaagcaacttagatgtgtctcactgcaacaaggtggtagccagctttgtgaagactggaccatcacatttgtctttgcttttatttctttcaagctaaaaaaaataataaaaaaaaatcctcctcactttgtctatgaacccgggcctgagcctttgtgtgaggttcacggttgtcctcacctttctcccagatccccgtggtccatcggctctccactgggttagggtggggacttctccacacacatccattttcttatcaccccaactaaggaccaattctgtctcccaagtccttaggcctctccaccttactccaagatcttaggatcctttaatctcaacaaaacaatcacctcttcacccaaatctccttcctaaagtccctacatcatttgccccccaggcagagccgcccgcttgtggggagacattctgtcctggctacgtctctcaccagcttctcactcctcacactgcacagttttaaatcattgttctgaattcaccagtgacttctccacagccaaggcccagaggacacttccaggtctccccttacagggattttcatgctgcacttggcatgatcatctacatacgcctcatccacctgcccgcccgtccatccatccatccatccatctgcccatccatccatccatccatctgcccatccatccatccatccatccatccatccatccatccatccgcccatccatccatccatccatccatctgcccatccatccatccatcatgaccccagccctagttatctccagtgtcctagttttagggcgggtctctggcttctgtgtgactgttctgtcgtggtccacccacctgccatcttatgcacaacgctctggctccagcttcctgaggctcaccctgggtccctccttctcctctggcttagctttaaatctcctcactttggccaaatggcttaactcctcggtggctcctccacaccttcagggaaggaccgcaatgctcctcacaagaatttgtgctccgccatctccgccctccactcctcaccccacctgcctgcctttgctgactatgaagtagccccttgatttggcaacagtggtgccagttaatagttcatgtgccaggtgctacagaggtaaggtcgccctgtgagctcgcccactgacccatgggagcccccacgagctcagttctcacaggatgccaatgtcacggacaggaaacagaagccaaggcagatactgcgcccttcacatggatggcctcccacacgtgtcaccaagggtggccccagtgtaacttctggcctctctataatttctggcttcactctgccatccctgggcacctgtcattccatttctgtgctcagccatggctccccaaccccaggccaggttagagtacagctccctgtacttgctgggacattgttttctttgtcctcatctctagctgactaagtttttaaggagaaaaccaactgtctgtgtagtatcgtcaaaacctgtccttaactacaggaggtatgtcctctaaatactaactgggcagggtcccccagcttaccacccttcaatgacatctccttgttcttaggactgaatcaaaaggattagctcagaaccgattatggtgattactctgctacagtgccaggcctccaggcagcccagctccccctccttcccttcccaatcagctcacaggtgccagacaggccgtgctgatcactgcaggcagagatgaaacagaacagcaaagagcaggctccttgcagacattccagctgggcaaccctccagcaggctctggatatactctgaagtgtggctctaatgagtcaccccacacacatccttcatagcaaaggtggtggcgaggggagagcccaggaatggggaaacaacatggaggttaggggctacctctccaggacgtctctagagcgccccctgctggatgctttatatattcaggcccggccttgaaagccaagggatggattgggtattttatcctagaaaatcagggaggtccaagacttggaatgtagctccgctgcctaagccttagcactgcacacaacagtcatggtgacacatgcttgcaatccccgcatttgggagatggaggcaggaggatcagaagttcaaggccagccttagctagcctgggctacataagactgtccatgggctagatagaggtcaaggtgactgcattcacggttggaagtatctctttgggttcaatccatggaacagtaattggaacacgtgagtaggattccaaccatctaatgcaaaacccaggggcacctactgttttggcaagcttcatgggaatcttggtgtcaaggcctccagtgtgtgtggcttccctggctctgctctccatgtcttagaacaggttgtttagaaggtccctcaatctcctaattaagatgttggatacctggaggtcacggagaggattggttcttttcaatagaatcctgattgaatagtgagaaagagagaaagcctgtagtggcatggagtgtctttacacctctgagacctggggtggtctggagctttcctaggacaaagccataacatgccaacagcgaggaaggacccacgtcccagcaaggagacagaaagcacactgggaaaggaaaaagagcaaaggggccattgagagctgaggaagaacaggcaaagtatcagagaaatccagatttgtaccactcagtaggtgcgcaggttgctcaggcgcctacatctcagtcttgttctctatgagatgggtcatgtccatgctgcccgatccagttatgtgactgtagtgaggttatgtgtatgaatttgccagcatagagcctggcaaaaaggggcccaataaaggctggtccatttccatccttagcaggaagcctgagagcttcccaaagatgctgtcatgggctgacatggaggatcactgccagccacagaaaactgttcagaagaggatcgcaagacagaagggtgctcaacatggaggtttccgtcccaggtgtggtcttatgcaacagtggttccttcccccaagaacttcactccccagtcagccttgggaccatggatttaaaatacaaacaccacacactaggaaggccccaggaggcaataggggaggaatatccccatgacattgaagctggcaaacatttccaggcaggtcacaatactaaccacaagtacaacaaaaataaggattcttgtacattaaagacattgttgataagatgaaaagtcaaattatatcctgtgagaaaataataataatccatatatctggcaaagacttgcatctgaacaaatgaatagtagaaaggcaatccaagtattgtgtcgctgtttcttctgggttggacacggccaccgctgtcttaaactagagcaagtgtgatcaccagcaaaaggcatcacaggagacagtgcctcaaagcgccccctcctggagagagggggaactcacaaggctccaccctctcctgggtatacagggttgattggaggtagaagactcttgcttattagctgcccagaggtctcagcatgttggtatgttggtatggtgtggtctacacactccctggagatggagctgcctttgagtcgtccgagctcttcaagtaagcgggacaaacaattggttcacctgtttagacctggatagaatccttccatggtctgttggtgccctcgtcactagaaaagtcagagatgggttggtttgggaaagagctgacacaaaattaccttcaggtaggagctttgttcatagggagcccctccctcacgggagctgtgatcaaacctggaggggggacagtccttcatattagagacaacacgatggggcctggaggggtttgaaaactggagaggtactttagtaagagagatgacttagagaggggaaggaggggaggaggagggggaggaggaaaaagacagagagagagagctagtacaagtgagctaccatggacaatgtgacagaggggacccagagacaggcttcatttgacaattgtattgggggtgttgggaagtcccacgccacataatttctgggatagcctatataataaagagcagggaggagtcaggtattgtgtaggccttaaattatgggctgtagcactccacaggacttcttaattctctgtctcagagagcactgcactggggggttcagcttgatttcttcaggctgtgggatttggctagcttagagtgcctagtatcttggggaagggtgcagggccaggatctgtcactcttcatgtctggggtgagtagacatttctttatgtcttcccagggaaagtcacaggacaccaattaaaatgggaataacatgaacaattctttatttgcaatgacacagacatgcttactaagaccccggggttctcagtgttatcaaacacttgggaagcacacatgaagaccatgtgtgccaaggctacgctcccactgaatggctaaacacagcaaaggttgacaaggccacggggcagcctgaaacctacagacaggaggccccagtgcaagcacttacaacaatcctggaaaactggtagtttctttcaagaaaatatacatctagcccacaactttatgatttcacttctaggtacttccccaggaggggtgaagactgagctacaaaaagatttgcaaagtaatgtgtattgtagtgttatttctcacagatcaaacctggaaacaaccccccaaaggaaaacgacaaccaaaaccaacaaattacaacaagaagcatctcaaattatgttcaaaaaaaatccagatgcaaaaattggctatggttccttttatatgaagttccagaatagggaaattccttctatgtttgcagacaccgcagcagtgcttggatcaaggcaagggtggagctggcagcaggagagggaacttggagagcaggaaactattcagtatcttgactaaggtaggggttacactgctgtgggcattagaaggccatttagcatttgtctgttttgctatattttgtaaaatagcttcatgactgacttccttctcagattttcaggggtgctgcctagacctttaaaggggtaactccatctcatatgtacacgtgtgtccacccatgtctcacagcatgcatggagatgtcggaggacaatttgtgggcattgtttatctccttccatcatgtaggtcctggggatggaactctggacattaggcttggggacaagctgagccatctcactaacttaggtaaaacagtgaccacgatccaatcggtgaagctccaagggtgacatgaaagccaggtagaattacacctggggtcctccagttccaaatttctgacattttctgtgaatgtctctaggggatgaactgtgaggacctcagggcttgtttcagagctgcagactgagcaaggcctttgccagtcaagaccccatgcccactcctgcacctcggcatgacctcttggttggatgtcttatttccaagtataagctggctttctagttccttcttacaaaggctttccttatcttcacattggccacactggtggcaacttactggcataactccctccaggcttggcatgaatttcaggctcggtaggtgctgcccacacaccgcagctgcagctgggaaagtaggacattaacatcccaggtcactggaaaaaccatgtgacagccttgagtgcggggccctgaggatggctggagcagcaagcccaggtcatcatagcagagaaaaaggcccaggttcctctctgccaaggcacctgcttcctgaagtgagactgagccccaaggagacatgatgtcattactttttatcacatgtcagtgaggtggctttcctggggagggtatggaaaactgaagcttaattgggaaaagaaccagcatctccagccatttgggtcagatccctgtgttccagaaagaaagccaccctgtctgagttgcccggaccatgctgccagcgaggaccacaacagccttagcaagttctttccatggaattttctgtaaaataaaaatcctgaatttctttaaggcccccatctaaatgagagctgttgtggctggtgagaaataaaatacttaattgctaagtaaaacatattaaaaattcctttactctcaaggaaaacagcaacatgttacacacacacacacacacacacacacacacacacacacacatacacacacacatatatgtgtgtgtgtatatatatatatatatgatgctaaaaatatttattattgttgtgcagtgtgaactcatgtgatacatggtgtgtgtgtgtgtgtgtgtgtgtgtgtgtgtgtgtgtaggtgtgcaattgtgccacagcacacttctagaggtcagaggacagttgtggtgtcagttgtcccctcctttatgtttgcaaggatcagacttccatcactaggcttgcacagcaggctcctttatctgtggagccatcctgccagccttccgtgatttgttcacgcatactcagcagttgaaatgattgttctaccttgcttgtttaatttaaaaattaagaactagtatggtggcagatgcttgcggtcccaacccaagcaacaaggtaaggctctatattgaaaaacaaatgaacagataaatttggggtgataattgttctattttctgtcttttacacagatagatgttatcatgttgattttaagtgagggcatatttattttgcctatttcaagatggattaacaaaatgtacacagtattaaaaattaaatagtaaaaggctccgatgagagggcacaatgatagctccatgggtgaagccgtttgccaccacacctgatgacctgagttcaatccctaccagcccacaaggtggaagaagagaacacattcccacaaattgtcttctgtctctgattacatatgctgtggaacatacacatatgtgtgcatgcaagggctcatatgtgtgttcatgtgtgcactcacatgcgtgcacgcacatacacacatacacactcacacacaaacacacactaaacaaatatagaaagaaaaattttaaactaataccaaagatgcataatgaaagcttgtgttctcttgtaccctaatgatctccccaagtcccccagagaaatgactctttttggcgggacagcacaggaaaggcactgatatccagtggccttcccaacaaaactaaggtgtttggggatgaggaatttgcctcatctgttctacagacatgataaaaatgtccctgcatcttacatttctttgatttcaaactgcagaatacgaccttggacaaaagagaacagatccgtgggtgcagagaaactacattctacaaaggatacacatgtggtcactgctgcccaggtcaagacatagagcctaccagtatctcagaagtcccttccctgtgcctcaaagatgacagctgtcagcactgtcaccataggtgggtgctgtctgttcacacatagccaccatgttccactgccagcatttccgtgagagtggtgcccgtgtttatagataactacaatgactgaagtgtctgtgtagttctttctcagtgaccacagtctgttcttttatggttaatggacaagaaagttgctcccagtgttggctatttgtataatgctgatcaagcatctggtagaatatgtacacgtttctagtatgtgggggacatgtatggaatcaactcaatcaggaaatgacaactggctttctgaaaagatgctaatttgcatagtcaccatcaaccaaggagtttgcattgttccatgtctttttcactatttggtactgccagtcatcttgattttagccacgttggtgggtgggtagtgccacaccaatgtggttttgattgatatttctctggtgactaaagagaacaaatacctgtcaattttcttgttgagctataatagaatcttttgtttccaaagcttgagaacaatttagttagttttactttaaaaataaaacgaaacaacccccccccctccatggcaggcagggtgtgactctcagcagatgcagggagagggagactggagaagaaaaaggggaaagccatgccacctgagtgaagtcagcatggacgtcaggcaggaagaccatgtgacataaagggaactctagaaaaaaaatggaagtccaaaatgtcaggaaaagcatgcttagaacacggggagaaagaaagggagggaagttacgcttttctgagtaattcagaaaggcaagcagactcacaaagccgcgtgtttacactttccctagtctccccctctccagttgtacaacgctatctcgctatctggctatctcgctactcattccagggagagacctgctgagcatggtagctgcccctgcagtgcctgcagatccaaggctgatgaataactgtggagagaccgaaccagcccagcatgtcttcctttgtcctcaggagctgtggttttaagtgtcaggaaagctgggattccgttttgctgtaccccttagaacagggatcaaaagaatgtattctctatgaataagccagggctgttttcctgccaccccacacccatccctccatcccagcactactcttggctgtcctaggtgtgactgtcctggctcaggagctccacaccacaacaccataagatgaagcccgatgcttccccgagcctgtaccatcttccaccttcacctgccttccgtttctctgtggtgtcactctcacagcctagccctgtcttacccctccctggagatttaagagcagaagacaactacgctggcacataagaaagtgggtgccatcagacacttccgatatttattaaggacttactatgcaccaggtcccacccttggcccaggacacaccggagaacaaaaaggggccagccaacagggctcacagttggaggatcctcacacacagcaaacacgtcattggtatacatttcactgacagaaatctgaggccaccaggaagaagcagtcatgctatcagagggaaatgaccctggtgggagtcagtggggaaagaagcttgggcaggaagtgcaggtggaagactccctcgtggtccctaaactatgtgtgatgctgtgactagggagggcggggcatagagcatgggtccttcctcatggagcttacagtccagaggggcagcaaggagtaaggcccagactagaaaggctagatgttgtaccaagagtttccagaagagagcaggtggaggactttgtgttggaaggattcatggggtctttaaggactggatttcagagaatatgtggaatgaatgggaagacacaggagaacattccagaaagaagaagtggagtggggtgtacattgtctgtataaaggcaaatatactgctgactgcagggtaagctcagacacggggataagaagtgctcagagtctgtggagtgtgtgtctgtcacagtgagggtatgggaatgacactttgggtgctgagctccccccccccatgtattcatgctgcaacagctggcctagcagacacccgaatgtgaaggagttcaaatgacagactagggtacttgtgacacagttctttggtttagagtttcttaatgcttttgtagaaaaacactgctatattaatagacacacaaaatgactagaatgcaaagtacacttaaatcctttttaggattaaaaaaatacaaattcaaagaaatcactacagcctccaggggcctttgaatttgagtcgtcttctatggtcgttagggccattaagaaaaatatcaggaagccatggcgttcttggccaatgagcatttatttgcagcatatttatgaggtagatattgttaggctgacaggagagaacagtggggcccagccatggtataacatgctcaagttacacagataagaaaccacagaatcagtaagaaaagtgtgtgtggagtccacatccttcttagggttgtgtatcagacacagcagctgttgtgcagttgtagaaggtcgggctggtgctaagtatggaggggtatgagcaccaggtgacaggtgccatgcagaagatggccatgacccacgagaactggacctgctgcttgcaggacaggaagacagtgcattacggccacagcgatgctgctctgccatccagcttcttgttactaaggcagagtggcagcagccctcagcgctggcctcattcctatggccagagaaggccccggctcatctgtccatgttctacagtgtcaagaactcaggaccacccagcagcctgtccttgaactgagcagtacaggaagcgtgaagccacctctgacttctcccaaggtgccctcaccatctaggaggctggcagtctgaaacaggatgggagaagacagtgttattgggcttaaaaggaaatggaaagtgggagcctttagaagcttggaggtcagtgacctgaaaatcaagagattgatgatgttctcatagtcagaaaacaacctctgggaaggaccccccccagcccctcactcctaatggctgggcacatacaacgtggagagttctttgtggtgcgtgtaaaggcctccttccactaggaaatggtcgttaaggtttgcaactgcatggtattgtttctcttctctcccttttcttcctttagtatatgcccagagagtttgttaagaaaccagccaacatcctggaggtcctcgggccacctcaagtactgttgcttttgcagaaaccctctgatagtctcatgtctcatcagttgaaactgggacagggaccccaccaccaccacaatgagaacattcttgaggtcagacaggccccggctctgggcgtatctgaaggcttccaggcaccagccatccttgagaaactgtctgctcaccagacacacagtcttcctgctgccccacacagctgcctggatattggagatgtggttttccccagggatgaagtctctttcttcaaagcacagcctgagtctgttgcgggaactgtactgagcatccaggtgttttagcagagcattctgtgcccattcgaagtctttgctgctgaagcaaaagtaggcatcgtatctgtatgcactgggttccgaactccggaccttgtccttgagcaccagcccctgaatggtcttataacacaggaaacagccgccccggaactttatgactataaaggtggtgacgaggagcacagtcaaggtgacggtgcacagaaggaaaagggaaaactttagggtctgcgaggcttcctcttggtcacagtccttggtggagatgtcgtagagggagacccctagcagcgagtcagggtacatgcagtataggtctgtcggagagcccagcagggtgacattggtttggttgagccagacgataaaagggctaagttcacattggcagacgaactcattgtgcctcatgtccaagaccctaagtgaagcaaacgacccaggatcaggagagaaaagctgatttctagatatatcaagagtctctaaattagcaggtaaactgtcgggagagagtgtggtcagcctgttagcattaagactgagcaaccttaatgaaaccaagccgctaaatactccgggtgggaggaaattaaggtagttgttattcagatacagcttttggaggcgggataggccgttaaagacattccaacaggagccagtctcccaggcaagctgcagcatgttttctgaaaggaaaagctgttccaagctcaggttctctgaaggcgcctggacttccctgcaggaagaaagacggttctgattcaggatgagaaactggagctggggaattcgcaggagggagtagaggtcggacagattttccagcctgttctcagataactggatgtagctggctgtgaatcggatgggggtcagatcagccagcttattgccgcccagaaagacagccagtatgcttggcatgaaatcaacggttttaagggcattatcacggagatccaaggtgtgcaagtttttcagggatctgaatgtttcacgttgaatgaccccgatgtggttcttttggaggtcaatgtaggctactttcggcatcccgtagaagttggaattataaagttctcccagcagattacacgatatgttgagaacctggagactgtcaagtccataaaacgcattgtctgcgatcttgtttatcttgttggaggcgaggttcagaagctgcaattttttcagtgtttcaaacactcgggaattcaaggagaagatataaccatgtgaaaggtgcaggattgtcactgaacttctagccaggccagcaaatgtgttctggtcagggtctttgatgttctggaagccaaagccagaccccattatgtggtgggtaagaatcaaagaggaaacctggctgccctggatgatggaactgaagttccctgtgatgtccactgtccagccatttgaagaaagatctagtgttcccagccatatgcctctgaatgggttcccacatgtctcccaggacacagacactctgctgaacaggctagttgatttgagaccaaagaaagagagcgttctgccctggaggggcttgagttcatcctcacatacagtggatatttcattgaaggaaaaatctatgtcttctaaggaattcagtccctgaaatgaagaatggaggtgaaggctgtggatctcgttgccagacaggtctaagcgaactaatgaacttagatttctgaagtacccatctcttagcacagcactggagaggccacaggcaaacagacggagttccacgagatggggcagtccctgaaaagcatccagactcaagacttcaatctgggtttggcccaggtccaagatcctaaggttgggcaggtttctgaaggcctccgggccgatggccacgggtacaaactgggctcccagctccagcagcaggagttgctccaggaatggaaatgatgtcatgttgaccacactgatgtagttgaagctgagcaggagcctctcagtggtgtggaggacccagggaatctgggtaaggttacagttgtgaaataaggctacctggccatcaaaagaacagggagacaatcccagcatgggtgtggccatgaagatgacgccgaagagaagaccaagctggcccaccatgatctatggggaagagaaggataaaaacacatcagacctggggatctgcaccgggggcctcaacacgtgagggtttcctgtgtgatggggttgctctcttgcagccatttgctccacagactctgcaaacattctgcttggtggaaacacctgctagtgcatattgtacacaccgggcaccagtactttaaagacactgcaagccgggaaggtaactcagtggtagagtacttgcctactatgtgccgggctctaggtttctccctcagcaccacaaaaacagcaaacaaacaacaacaaaactgttacctacccagtgtttgtctattagttccagagttgctgagggaagttgaaaatcacatgggagagatgcttttatttctgttcatcagggattccccattcctaatccccagaacctcagcaggtgaacagcaaatgaacacattgatttctctactacactctagccagactctagcccatctccaaggatctgagctgactccacatactgtgcatgtcatcgcataggcactgggtatcttatgtatcttcataaagaatcagatgtgattagcctaagtgggctgtgttcctgctgcatgcctgacacgcacaactgctcgagatagaacaagaagcagaaccacacccacctgctgaagtttggtgcagggagctcaccatccatctgcatgcctcagcggcaaagggtgtctcacggatgtgtctatcatgtattcccagcataggtgctgtatgagaacagaaaaaaattaacaaggatctcaggaagcttaatgttttctgtgtaggtctgaataagaagggccccgtaggctcagctatttgaatgtttagtcaccagagagtggaattctttgaaagggttgaggaagtgaaccactgtgggctttgagggttcaaagttacatgccaggcccagccagtctctctttcttggcctgtggatcaggatgtagctctcagctacttctctagaaccatgcctgacatgcctgtcaccgtgttcctccccaccatgatgataacagactgtgcctctggaactataagcaagccccaattaaatactttctaagagttggctgtggtcatggtgtctcttcacgacaatggaacagtagctaagacatcttccatgtgcagggctcctccatctttagaatacatctcacttgctgccaatggctcttattaaaagccttggttggaatgtcctgtgttcagccgggtgttggtggcgcacgcctttaatcccagcactcgggaggcagaggcaggcggatctctgtgagtttgaggccagcctggtctctagagtgagtgccaggataggctccaaagctacacagagaaaccctgtctcgaaaaacaaacaaacaaacaaacaaacaaaaaacaaaaacaaaacaagcaaacaaaaaagaaatgtcctgtgttctagaaagtactctccaagggctcaggtgttaaaggactgtcatccagtgacatcactgggaggcagtcaagcctttagggggtggggcttggtggaggaacttaggtcactgaggttgtgcctttaaagagacactggcctcttatgcaccctgtgagccatccatctctctccgtgcagatccctctttgccctgcctagacttgccatcacgctgcagcacctgccaacttcaagtgtgcactcgtcatttctacccagaatagtttccccaaagccctggccatcaccaagtagaagtcctagctgatagagcaagtcaagagagggcagagtagaatctacaaggagagagatgaacatcttgagagatgatagaggaggcagctactaaaatggaccctaagcaaagctccatctctcctggcatgcagcctcaacactggggggttgtagaggctgtagaacctggaatggcagatgaaggaatcaagtcttttgagtggtactcaaagtgaagatgctgaagatgtgcttcagtggagaaaagaaacgggcaaaccaggtttgcgacccatgtaggaaaataaacagtggtggttctttcagtgggaagtgaggtctactgtggcctccaaagcatgcctcatcacccacacccaaaaataccacagttcttttactgcacacagtcagactgctgggcagtagacagcctactgtagtgctcctcctatagtttgtttttgtgatgtatgtctgcatagcgcaagcaggtgagtgtaagaatgtgcacatccatgtgtgtgcttgcagagaccagggaaggatgttgggtgtcttcatctatagtgttctgtcttaatgccttgggacagggtccctcacagaattgtaggctcactgttctgacttgcccagctttcatggtttccctgtccatcctcttcagccactatccctgagctttggggttacagacatatgacactatacatagcttcttcatagactttgaagtcttgagaactttggaaatctgttgaaagttttgtgaccttatcttccactggcatcacaaacctaatgctcagagcacaccaatctcccaaacctgcctgttttaaggtgatgtaaggcaccttcggtatgcattgaaacaaccaccatggtttgtaggttggggggtggaaacactgtctgtaaagggctagatggcaaatgtgttaggctgtgctgtccaaatacagaccatagcttgctggcttctgttctagaagaaaagagaacagaaactctgactccacaaataagggtttttaagtgactctaagatgaacacggtattaagacacaagaaggtgcaggaaacagctagtgtggtccccaagtcactgcagccgttatcttacccaaacaccaggctgatttctcatcttatgtaactggatggagacattcccttggagacacaagtgtgagggtgccagcttagggaaacacagttaaatttcttcctttttaattctgacttttgatgggatcagtgttggtctccaggtacaaccgttgaactagatctagaccttgaattttttggtaatgagtgacagccctaaataacatgcatcccacaatatttcaatttctaaatccacaagagaaactaaattaaagtaaggaagatgaaaccagctgaacaagtagattttaaatgaaactctttgggcccaagttctaattacaaaaatatcatggagacctatgtctctaaaaggtgtagaaggatggaatgattccatttttacctctgaagcagatggctggttaaaatggctggcaggacaggtgagcaggggagccagctaatcagtgagatgagatgttgggagagccttcagagagcctgagagggaaaccagcaagcattggttctgaaatgggagccagaagcgcaaatgtgtggaaataaagacatccagcaccagcaaggcaaacctaactaaagatgagctcccgactgccacgctcttccagagtccacacagcgagagagtagtgtgcatgagggcaagcgatcagacaggagcaagtgactgaagccacacccctaagtggagagcccagagaggagcaaggtcctgtacatgggtggagagcccaagggaagcatgggagccatgggcacttgcttctctctaggttgaggggttggaccctaaccatcagggaatcccttcgggcccctatcagaggagtctgccatctagtggttgccaacggtagagggcggaaaggaaaaaaaggcaggctaaataaacttccgggcaatgtgtccaggaatcattacccagatgataaaaagaagcacacgaagtgacttccttcgttaggagtccctggtgacatctacatccctgttcgtagaggcagagcatgcgttagatcctgggctcggtccttcacccaccgtggacaccactcaagacaagtcattgcccttcggctggctgtggtgagcatgcctgtagtcctagaacccgggagatgcggacggggaatgtagagttccaggctggattccatagccaaccttatctcaaacaaaaacaaaaccgttgcgaagagcatacgctctgccccaggatttataggaaaagtagggtgagagtaaaagactcaaaggctcatcatttgcgcgcgcgtgcacacacacacacacacacacatacttacatacacacacacacacactcttacatacacacatacacatacacactcacacaccattcacacacacactctcacacacagacacacacacacagacacacacgcactcgcacacactcacaacatacacacacacatacttacatacacacacacacacttacatacacacatacacatacacactcacacaccattcacacacacactctcacacacagacacacacacacagacacacacgcactcgcacacactcacaacatacacacacacacacatacttacatacacacacacacttacatacacatacacacacacaccattcacacacacactctcacacacagacacacacgcactcgcacacactcacaacatacacacacacacatacttacatacacacacacacacttacatacacatacacacacaccattcacacacacactctcacacacagacacacacacagacacacacgcactcgcacacactcacaacatatacacacacacacactcatatacatacattcacacacacactcgcccacttacatacacacacgcacacactcacacatacacacactatcacactcaaaatcacacccgcactcacacacactcacacactcgaactcacacgcactcacactcacacacactcacatatgcatgcacacacatacacactcacacacatacacacataaacacacattcacacacactcatgcacactcacaacactcacacacatacacacattcacacaacactcacacacatacatacacacattcacacacactcttacacacataacacacatacacacattcacacacatatacacacattcacacacacacatacatattcgcacacacacatacaacacacatacatacacacacattcacacacacagagagacacacacacaggacaggaattaaataaaagtggtgtgtggtaagcctagttaaatgaacaagaggcccattaatgcttcaagagacatggcggcttgactttggaaaagaccagaggtttgcaccaggagggtttcagtcactgaattattataaaatagtgggaagaggggggctgtctggtatcagggggaaaatttgaacgccaactgtagatgcccgaggcacaaaacacaaggagagtgaaggcagctggcggacaccagggtgtattttgtgtatcgtaggtggcttagttcagcttggtgcagttttctgtctttgtatataagaaattgcacatgagaacaaatgaactatgcatttctaataccaggggtttttgttttgttttgttgctattgattgagcccatagccttgggcatgttaggcaagagcttttccactgaactgtatcttcagtcaagttcgctaacacatcaatagtctccccaaatatatcagtatcattgcctgatgtcaatttccttaggaacaagttcacattttgaaagaagcactatagctgaacagacaggaccagctcagtgatggatggagaatgctagtttgtaaacagtttcacccctgcatggaacagtaggatggacttgggaatcagtcctgtagactcagcttcagggatagaggagggccaaggtcctctttccagcttcagtgtccttaagtttcctttaaagactgaccaagatgaacagtcctcaatttggttacatattaaatcactgtagagtcttgatatctgtgaggactggctcttactagacatattcagtgagacacttactgatggcattttatatacactcaggccagaaagttattggcataaatcaataatggctggatttccaataccttgaaatctcctggagtctgtgcctgggtccaggctggttttagatgaccaagcaggcatgtcagacaggcagcccataggtcccatgcagccaaagacagccctgaatgctgcccaacacaaaacagtaaacttatgttttaaaaacatgatgagacttttgttcagtttattttctttgtaacttgactgcaaggttcttgacactatgttgcagtgttaaaagcttggacatccctgggctcccaaagttgttagctctcaataggtgactccaggaggggacagtttgatcacctgctcttctggctacaaccttgactccacctcaaccatcagtgcatagaaacaccatgaagcataggatttctaatgacccaagacattgtcctgggcaatcacacaaaagcagtgaaaacaaaaccccctaaaggaatttatatgccgtgttcttagcagagaggttcacaattgctgaggcaagaatgaaccaagaaacagtaagagtgaatacccaggagtggctgtgcatggaatggggtacaactcagcctttaaaagggacagaagtccttttaaagtttaacttcttcttcttcttcttcttcttcttcttcttcttcttcttcttcttcttcttcttcttcttcttcttcttcttcttcttctttgtgtgtatgcatgtggaggtcaaagaaccactttgtgacgtcacttcttcccttcgatctttacatgggttccagggaccaaactcaggtaactgctgggccatctctccagccccagaggaataaaattgggatacatgctacaaaatggatggatttttttttttgagacaggatttttttatttggttttgtgtgtgtgtgtgtgtgtgtgtgtgtgtgtgtgtgtgtgtgtgtgtgtgtgtagccctagctctgtagaccaggttggctggcttcaaactcacagagatccacctgcctctgcttcccaagtgctaggattaaaggcgtgcaccaccacctccctgctacggatggattttgaagacattatattaaatataatcaatgaggcacagaagagcaaatattgggtgattccaaactctggcacaggctatgcaaacactttcctactgagctacacactaacctacatgcagtttctagaacagacaagtttttacagagacagaagacacagtgaggttaccaggggctgagaggagtgggtggggcatgattgctcaatggacccagaattccaaaaattcaggactgtgagaaattctgaagataaccagtggtgaatgtgtctaatgccctgaactgcatgcacccttaaaacaatttaaatgacagagtttatgtcatgcatactttgccagaattttaaaaagaactaagccaggtgtggtggtagtacaaacctctgatcccagtggatgggagggagaaagagggggtgtggggcacaagttcatccctggctgcaaagcaagttcgaggctagcctgagcaaggcaaggctctccattacattagaaaaagaaatcaatttaacaagctgaaacccactgctgacgctccagcagaccccacaggcttggaggctgttgaaagtagcattttagaactgtatcccaggctcctttgatgcaagcagttcccaggccatgctttgagaagtgtgggtctaaaggatcccctctaagtcacacacgccacgtttctcttgcaggaaggagccctggtgagaaggctgggatacagttgaatactgggttttgattattatggcagggttaacttgtgtcttgggttctgagggggacaaacaggaatagaacaatcaatactggcctccaaactcctgccacgcagtgttaattaagataatcaggccagagggagaaggtcagcatccttgtgtttctctgccttcatttcgagttaatcccagtcattaagagagcaggttcctttcttcattgcctgagttgaaaagctgcctgcccaagcaatctgagttacggaccacgatattggcagcaaacccgtaagcttttattttgggggtgctgctcctctcctgacactgcagttagtgaatgcctcgggctgagtcagggaagcccttgttttaatttaatacttgatccttagaaaaccacaccagtcatggattgttggcaaggccccagggtctgagctgagtcccagggtaggtatgtccatgagataagttgcggaagggatgtctcctctggtaagtaccgggcccaaacctggggtgccattggagcaccaaggatggaagactgactatgcaagaaaaccaagattcatttgcaaataggtgcctcggagagtttctccaaagttcacacagtaataactgtggactaattcccagtgtgagttcgggatgcagggttaagacagaatgttggactggaggaactgtggacccagaaatgctttggacagttccaaggggtgttcatttgttggtgtcctaatttggatctgaagtgcgccgtgggaattcattcagtgaatagacttggggtattggccttagggcgtgacctcttgtctgctgacatgatctcttacaaggaaaagtggggacagtcactctctcttgggatgtcggagcagaagcaagccttgcggttgttcacatccccggatgggcagaacggcaggacatggcagctggatccactggagcttccaccttgttctgtattcctgagtctgtatttcctgttgaatcctgtaataaagacttttgtaaattctcgcatcagaagtgtcttccttgggctcttgtttggatagctgccccctccagctagtggtgctgtttttggtgggggtgttctaggagctttgggagatgagccccagatgaaagaagtgagtccctggaggtggatccagggcggcttattgtcccaggctccttctggtcatttcctgtctactggctcttctcctcctcctcctcctcctcctcctcctcctcctcctcctcctccttcttccttcctcctcctcctcctccttccgtctcataaaccatctcttcaagccatccctcagcattttcagcccccggcttcccagctgttgcagaccagctgccttccttctgtatggctgcacacagtgcgtactggtatccacacgacagtgtgccactcaggtgtgccctcagcacacggtctccaagtccctcatttcccctacagtccaggagtcatacagtagccagctctccctcgttcccatttgtaaaagaaataggaagtccaggctccagccctagccagagggatctgctactgccctcttctggtctgaacttgtgggggacagccacgaggtagcctcgtcaccccccccccccgccccccagactctgtgctgctgtgaagggacccagcccttcaggctgacgctgatatgggtagaggatggctcattcatgggatcatgattgcaagaggtaccatcctcacagctgggagcagctgcctgttgagagctgggaatggcaccactgccatactcctcagcaccatccactccagtgcccttgggactggcacagcaggtgaatgcccaatgcttgacaactgttctgtaaacaggactcagatcagcacattagttttccggggatgctgtgtgcacaggagagtgaattgtttaccgatgttcaccgttctcattagggtctgtttgcctttgcctctccaaatgtttatgattccgcaatacaaagcatgtctgttatgtctagcccagcaagaactttcccatttatctgttatctttgttccatgttatagggtcagggggtcggacgccaagaggaaccattcctggctcatggagttcccactctgggtggttctggcgggtgggaactctgggaggctagaaatcctcaccttttctcagagccacagaccttctgctggacctctgctagaaatggactcacaaattgccatcaggctccctggtttgcacttaaaagcccacctgtgacccctattgtaaattagaatttcattcctgattccaggtagtgctttgttctctttggcttacggtaaacatttgctgaatggatgcatgtatttgcatccagcttaggcctccctcctcctggccttgcaggaatggatgcccagggcctgagatttgtgtgcttctcttggtcccttggatggattggcctcagcttgtttaaacagctttcttatttcccgtggtctctcctcaacacaccttgcaaagtgagtgaggtcatcatggattccccaagaagccagcattaatgcatctgggaacttcagcaaattcactgtgcagctccactgcctggctcaattcaaggcccactgcatcgggatgaccgaggtgaccactctgcttgagttatggttagaatcttaaatatccccgaaggcccatgtgttaagtcttagtcaccagtttctagacggagctcttggggtatggcagagtctttaggaggggtgtgatgtggttggtaggttaaggtactgcagctgtgtccttcgggaatatggagactcttggtccctcctgtctttctttctgcttttgatgtctaaagtggcatgtgctcctgcctccaccactgtcctgccacaggccctagaccatcaggcccagggattatcagttaaagcttcaacctcctgcttacacattagctcaggtatttcatcactcggacaaaaatctaacagtgtttgactgtaacacatgcatccttacacacatgtctctaacacatgcatccttacacacatgactgtaacacatgcatccttacacacatgaccgtaacacatgcatccttacacacatgaccctaacacatgcatccttacacacatgaccctacacatgcatccttacacacgtctctaacacatgcatccttacatacatgaccctaacacatgcatccttacacacatgtctctaacacatgcatccttatacacatgaccctaacacatgcatccttacacacatgaccctacacatgcatccttacacacatgtctctaacacatgcatccttacacacatgtctctaacacatgcatccttacacacatgaccctaacacatgcatccttacacacatgactgtaacacatgcatccttacacacgtctctaacacatgcatccttacatacatgtctctaacacatgcatccttacacacacgtctctaacacatgcatccttacacacatgaccctaacacatgcatccttacacacatgtctctaacacatgcacctttacacacatgaccctaacacatgcatccttacacacatgtctctaacacatgcacccttacacacatgaccctaacacatgcatcctcacacacatgaccctaacacatgcacccttacacacatgtctctaacacatgcatccttacacacatgactgtaacacatgcatccttacacacgtctctaacacatgcatccttacacacatgtctctaacacatgcatccttacacacatgaccctaacacatgcatccttacacacatgtctctaacacatgcatccttacacacatgtctctaacacacacatgctactgagagggagtttcccagaagacaacactggctagaaaagttctccatgagcccttagcccacaaaccagaactcttcagggtggctccagggtccccacctcagactacaagccttctagaagagctatgtagaggggacatttcaggcttgaattgtcattttatagagggtaacccaacccaggcagccttccccatcagctctatgctgtctgctgtcactgcctcacgtcctgacttcctacctttcttagaatttggcttcccctcatccttcatgtccctgcctagtctggtccccagctccgagtgcacacatatgtctcatcggctcagcccagcccatcttccctccaaagctaactcaaagcagtcgtcacctccctccaggcgtgttcgcctccctgcctgggcattctggctccatctccatggcagcattctattactttacacctttcctcttaggctgtaagtcgtgagccaaggacttggttttattcacactggtcccccaccgttcctagcacaaccccagcaccccaacaatattcttcccattagtgtttgaaggtcacagtcccaccaggagtgctcaccttcccgtcctaaatccagggacatctaagacattcttctccttctaggggcagtggatctcaggctgttcgaagacttctgagactataggaatctcatcacagccatggcaacaaaaaccatttcttttttaataactcgggagacacagcgtttgctaagagagagtaactagaaaacattgcacacatgtttttttctgggctgtgcatcactttccttttagctggtttctgctatgtgtgatttcactttggctttttgtgggggcactttttaaaaaattaaaatttaaagttagcatacaaaagcaatgagtttcattgtgccatttcatcaatataactgtcattatacttgttcttattcattttgttgtttggttttctgagacagagtctcactgtggagcctaggctggccttgaactcggagtcttcctgcctttcaggtgctggggttacaggtgtgagccctcactcacttaaatggaggcctgtaagacatgagggctgaagagactgagacatgcctaggccagcctctggtgcagaaggtggcttctaagtcactcagtcacaggagtgcttttctgttttgcaacaccaggaaggaaaaagaaactcacttcggtggtgtggatgtttcccccgggacctagaagtctttttcaagacctgtctgtgatcatttggtttctgagcttccagcactaggacaagacaattaacctgtctctgcactccaaggaaccaagaacttgctgactcaggggtcttgtgggtttctggcctgggagttgggggagggggggctggggatgggaggagtgagataaggccaccatcaggatttggcattcctaagcagcagggctgggtgaatgatgctggcagggttagaagccctgtgtaagtgctggggctcagatgtggaccggagtgccctaagggcggaagaacagacttgctgaacaccgaatcatttctaaatgatttaacatgtgcccagtgaggcagtgcccttggctgatgtctcacccagagtaaactgtggagctgggacttgaatccagttgtaagcatagttgtcaggttgtcatcgtgatctttaaacaaaatcaaacacacacagagcctcaaaggaggttgtgcacaggggtcccctggaggtggggatgctggcccacctggcctgggggtacctgagagcatcactttgttttaaattaagaaagtgtgtgtgtgtgtgtgtgtgtgtgtgtgtgtgtgtgtgtgtgttgtaactgtgtgagagggaatatgtggaggccagaggaccacttcaggtgtcatttctccactaccttatttgaggcaggatgtctttgctgtttgctactctgtaccccagaatagctgaagcattgagattgttgattgtgtgttacagttgctgatttttatgtcggtgctggggattcgaactcggtcctcacacttcacagctaatgagcctgaatttctaacgtgcccccaggtgattctgatggggctggcccactgagccctgcttttgtccggcactaattcgttctcctgtcaatgcctcacggtcaagattctacatgactggttttgagctgtattaatgaattcacccccaatttctctcacccctcgctggagatttttcacgagagggagctggaagagccccatggcaacagcttgggatcaatttctcaggtcctgcagaggcaactcctcctggacaccagcagggggcacactgcgcagagaccaggggaggagccctctgcgggaacaccagagttgggctctgctgggaagcgccaactgcctgcctaatgggaggctttccaaattaagacaaccaaactagtggctgaattggatcgtagctccacaatttaacatgtgcgtgagcttgggcaagcgaagacgttctttgagtatcactttaatcatctatgaaatagcaaggataatcgttccggcttcctccagcaacacgagggggggggggcaaaccagagaccctgtgtgcaatcctccaacagttctcaggtcttgctttgctcaagtccacagccatcattcatgtacccacccctcaccagaaaggcacaccctcagaaaccactgaaagggaatgcagagaggaggaacatttcctggagtgattggtatttcttctaccattcatgggaaattacctaacagtgactcctgtttgctttaatatctttagggaatggtccccagcactcccaaacaacaaacacacacagtaatactctgcaaaaccagtatcccagtggtttaggctcagaatgggctcttcctgcctgctgacttcagactcattagcatacttttatagcagctgatcaaaataagataatttcaactgcgtgattatgcaaaaccagggactggcgtgacacacttaaaaccttgggtgaagggagctcacgaagcagttggggatcctgatctgtctgtctgtcgccgggtttaggctatgccaatgttctcaattagaaaactaacagcgcaggctctgacaccttccccagatgcagttcagctaaaccctgagtatcgacggacaaagtaaactgccaggaaacctgggcgagagccaggtcagggagctggagcagagagagctgggacgtgcaatgacacagacaatttgctaagagcagcagaagccctttgcaggtgatgtaaatcagaagccattgggattgggctgtgtgtgaacagggactagaaaccctgttaagcccagaccagacatgcagaggatgggatcgtcagtgagatgatagagctctgagagctgccctggggaagatctgtggtctgtatttgaagagaatgcttcttaagccataacacccagtcagcagtgtggctggcactgactctcctggtgccagctgagccccacagtaggggtaagaactcaggtgcggaggagggaagaggacttcatggggaccgagacaggccaggactgggtggtgtgccctgaccagaagcacacattctcctagggggttatgcatgtggagtctgccaggcagggcacgagaggtgtctctccgctctaagttggggcaaggagtcagtgactagactcttgttggctggtgacagttacctccgttttatatgacatcacagcagtgctgggtcgggtgatgccaaatctgactttgaatcctccttcatctaccaacgggggtgggctggggtgggggtggggggcattctggacaagtcttggttttcttgtcctcagtatctgcattttgggtcacaccagaccagggatgacagtggcggtaaggtgtatgtgatcaaatccttgaagggtctctgttgctccaaactgggtgggtgagtgatgcctctgttaggcggcaaccatgagctagaagcatgcccccatttttgtggactctaaaactacccaaggaaacttgagcagtcagaccacagtcacacctccctgaagcagattattccacctccatgtgagcaaggctgcaagcctgttgcagggcatcttgaagacagtggagaagaatgtctttggcatatcgctgaaaatggtctcacagatatcctgcctttaagcatagcttcctctcaaagcgtagacagaaaacatttgggattaaaacacaagttttccccttccttgcgtttccgccttgccacacccacctctctcacagtttttctagtcattgccctctggcaaacatgacagaatcacacccagaggtagcttgtggcttcccaagcagggtcaatggcatgaggacacagactctttgctgagagagccaggcagagggcagcttggcagtggaaacagagggggaaacatggtctagggggccaggaagacaggactggttaggccctgcggaattagctttgtgtcgtgaagcaccgcaatgctagggcccttagaatggaaggggctgccagggggacagagactaaggccctctcttaggggtaactggagtgaccagagggctgggcggggcacactgactacccttgttcccgaggactcggcagtgcataaattctggaaattgtgacaatcccggggtgtttactgtgactcccagcccagtgaggtccagagtttaagcacacagtaagctgatttctagaaaataaaggagcggtgtggcaatcttgcacgtctgagaatgcccacgttagggattcatactcactgttctgtcactatggagatggagatggggagatggggagacggggttatatctctgagcaacctgtggccctgagctcagaggcaggggtggcttttggtgccgactgttacatttgtgcggtgtttaaattattttagggtttcccttcctctaaataggggtgaatatgaagggcaaacgagatgggacatgctgctcaaatccctgggtctcttatggtatctcacacactgcattgttggttggctattgaattactattgactatgagagtgctctaagctgcactgaaactgagtccagacagagaactggtccggtgacaccgggtgatggttcttgtggtggcatcaggaatgtgaacatgaacccaacaaagggccagctcgcttgtcctgagtgtaacaaagaggttttaaatgactagatctcaagccaggctgatgagtgtgaatcctggctcaccacgcaccactctcagtcaatagaacaatgtctggccccacataaatgctactgatgcattcatcataattacccattttattaatttgtgccaaagggaaagtgtctgactattatagggtaaagttaagagctggagatatggctcagcagttaagagcacttactgcccttgcctcccagtgctcacgtctgacagctcccaactaccaggaactccaactccgggggatgccatggcctgttctggcctccatgtactcctctactaatgtcttatgtgcacaccctcctacctgcctataatcccagcacttgggagactggcgtggtaagatgagaactttaaggccagcctggctacacagaattccaggatagcctgggctacacccagtctctaaaagcaaaagtagattctctaaggagaggagagaaaaaggaggcatgatcagaaccatgagggaaagagagagagagagagagagagagagagagagagagagagaggagagagtggcagagagagagaggggagagagagagagaagagagagagagagaaagagagagagaagagagagggagagcgagagcgagagagagagagagagagagagagagagagagagagagagagaggagagagagagagagcaggagcttgggctgcagaggatggtgagcttgtggacttcaggagcctctgcttgtctggatccaggctatcctatccttcagcctggcctggccttgcctggtttctaagtcgagcttcttaacatctagtttttccaagttctctgtctcttccagctcccataccctgtttcttggactgaactccaattgtctcaccgttgcagagttttctcttcctacctacacctggacaattcagagctgtgggagccatgccctagccttgtctttgttccacagagctgaacacaccatggactatggtccacacatccgaagactatgaaaccagggctgaaagacctgactgaagatgtggatcaatctaccctctgaatttttcttcacaaaatgaagaatgaaacaaacacatctgggctcagtaactgtcttcttcaggggtttttgctacacaactggcagtacgcacagacaaacaaaacaactctggttctactcctcagaggagctaaaactgagggtgcaggagcttaacaaagaaacccttgttctggcgacatcagctccaggagaggtctcctcttctcagacagaatgaaaacctgacaagattagatttgcagttacacagtggaaacagaaagcttttcttgcttagctcagagcaacacagggtggaggcaagtcatcctggggccaccaattaggatggaagtatcttccaggatgacaattaagtcttatgtgtgagctaagtcatcctgatttttataatagggactggtttttgtgccactctataatcaagtttggcataggcccttcctctgggacacccccagaacctcaccacagtgtgaaagactaaataagcatttagcagagctgaacccagggccctcttcccaggattccctcctgactctgcatggcatgctgggagttcctagctattgatttcttctcccagagaattaggtgaatggagtcaagaactacatacagatcttggatagactacgcaagagttgtgtcctctgaggaaaggcagaggataaagaccaagccgtgtgtgtgtgtgtgtgtgtgtgtgtgtgtgtgtgtgtgtgtgtctgtgtgtgtgtgtgtgtgtgtgtgtgtgtgtgtctgtgtgtgtgtgtgtgtgtgagagagagagagagagaaacagagagacagagagagagaagagagagacagagagacagagagagacagagagagagagagagagagagagagagagagagagagaggagagagagagacctcggcaagccttgtggtcaggctgcttgcctgtggtgaccagtgctacactgatgtgttcagaacactgattgactctagggctaaccgacagctagaaagaaacagttcagtcaacatgctgtgaccttccacaagacctcaggagccttcctggggacacatcctttctcccaagacaaccaataaggtggtccccaaaccaccatcctcatcagggaccatcattactgctgtggctttacagaacagagccgtggctgtaatcgccaaaggcaggactatttcctttcttcgtggcctcggggccaacaatatttatcatggagtccattgggctggcctgtctctccttgctggggtagggtgttgaacgccttcactgccagtgactttttaaggcatccacagctcaattgatggtgactgtctcccttttccaaggaaggcagtgaaggagctaactcagtgatagtcacttgcctcttccagaaggcggggccaaaggcgaaagtcagaagagtgacacactagggaatcccttgtcctaagaccttcgtgcaagtgagtcgtcaatcctagagctgccctgctgagcacagggtatgcactcttgctgactctccgctctgccctccgtccaccaccaggggaccccagtttccatggcacggagtagcagagagctcctgccttccaggggctggatgtcaggtggggaagagtattgaaagggcccaggaccaacccaggaggagggaagaggggcaatggcaccaaccgtgtccagccgtgtccagccgtgtccgggcccctccggtctcaggaaacccgctgcagggcgccctgcaactacaaggcgttcacttcccaagcgggatcctccacatgggctcctggcctgacctcgctctgcagctggcaccaaagcagcagcctggggaatgccccacccgccgctgggactccgcccacaactctgaccacgcccactatgtggtatgcttcatcttttctaaaagtcttgccccggcagtcttagcaaagttacctcagcctaggtaccctctttgctctcttgccaggggaagacctttgtccttgctgcaatgatcttgtgactgaggcaagagagaaagcagaattgggcaaaggctattgactatcatagagcctaagagaggaggcagagggcctgcagtgactcctgaagagacccctaaacatccatcgaaataatctaggccagcattggcccaggtaaggaagcttaggcccaagtccagaagcgctctacagaggtacagccagcaggacctgaacccacacagttgcccccattcttgcctgtgttctttgacctgtgccaaatttaggccaaatcctgaagatgtgctgggggtgacactggctggcattctgccctctaacactcagctataccctctgtcctaactactgaaggtgtgtgtgtgtgtgtgtgtgtgtgtgtgtgtgtgtgtgtgtgttgatatatgtacacacgtgcacatgtgtttaaatgccagagaagggagttgaaagggcccaggatctctggtatcattcattaagagctgtccatcttgtttactgaggcaggatccctcactggcctagaactcgtcatgtagtctaggttggttaaccagcaagccccagggatcagctgatctctacctctctgatgctgggattgccaacaagggccgagatgcctggcttttttacttgggtgctaggaattgaactctggtcctcacgcttacaaaagccattaccacctgagccatctgccagactaatactgaattatcttaaggtcagatttgggtcaggagatgcctctgcgtgtggctggaggctgaggaaggaagttgtgatttctgccagagaatgcaaggcagatgctttctgtcttgtgagcccagcgtccttctgccctaacttcccctttccatctgatcccagggggagagtgcttggtctgctttctgaaaagggacatgctgaaagagaggaaagactccagagcctgctgccactggagtgttaaaaaagagttaatttttataagaaggcgatgaagtagttttgggggaggagggggttgaaacccaggtcaaggacagaagcgacacagtctggagtaagatggttggggttgcatggaggttggacgaagctgacagctgcctcttgtagcggggtgtaatcccagggtgactcaccccctcccccgctccctgcctgacagctaggcgatatgatcaagcagggcaggagagataggttaaaacaaagcccggcacttaattaccacgtaagatctcattatagagtcgtcccagctcccctccttggctggcagcttgaagcccaagtgacaaattgcctcaagtagctctcaaacatctgagtgcagagggatggagctgcctgcctgtccacctgttctgcagcgggagggggaggtttctaagctccaggaggaagtagtggcctgggcaccaacatctgacctaatgagcctgttagcgggagcccactgggtccctccagcgtgggtgggactgaggacaaggcagggagtgttgggtacatggccccgttctcttcctttgtagaaccagggagggttttatcacaggagtgctagggctatggagagagctccctgaggccccagcctgctgacacctgattttggataagtgtcctggttactgggccccagagacttgttggaaggaagaatgaaaggcaccagctggaatattctttctttatgattttgtcaggcttattagacccccatcccctctagtatgaatgctcccaacacttgtacagatagtctccaatttatggtagttctgcttgtgaatctgtaggtgtgtgtgtgtgtgtgtgtgtgtgtgtgtgtgtgtgtgtgtgttgatgcaaaagtgacttgcattcagtggaaactgaattttgacctttgaatttgggtttcttctgcctagtttcacattgagttctatcctcttcatgagggagcaggaagattgagtcagtgaaagaatagaggagagcaagaaaagagataccatcatagagggagctattataggtttaaagagaaatctggcactagggaaatgtccagagatccacaaggttgatcccaactaacaatctaagcaatagtggagaggctaccttaaatgtccttctctgataatgagattgatgactaccttatatgccatcctagagccttcatccagtagctgatggaagcagaagcagacacccacagctaaacactgagatgaactctggaatccagttgcagagagggaggagtgatgagcaaaggggtcaagaccaggctggagaggcccacagaaacagctgacctgaacatggacctcagactgatagctgagaggccagcatgggactaatccagaccccatgaacaaggatgtcagtttggaggtctgggcaatctatagggcctctggtagtggatcagtatttatccctagtgtaggaatggactttgggagcccattccacatagagggatacgctctcagcgtagacacacagggggggggggtctaggccctgctccaaatgatacgacagactttgaagatcccccatggaaggcctcaccttccctggggagaggaaaggggatgggatgggggtaggtgggggagcaggggaggaggggagggagagggaactgggattgacatgttaaacaagcatgtttcttatttaaataaaaaaagggaaaagaagttctatcctctttctttaaaagatttttatttaaattttactcttggtgtgtgtgtgtttgtgtgtgtgtgtgtgtgtgtgtgagagagagagagagagagagagagagagagagagagagagagagagagactgtggtagccacaaaaggcacaaaagggtgtcagatcccctggagtggcctttacaagatgttatgaatagctagatgtgggtactgggaactgaacttgggttctctgtaagagcagcaagtgttcttaacctctgagccatctctccagccccttattcttggttgctgtacagccagcaggccacacccctgctcagccacttgatcacaagagcaaacaatgaactccagtatattgcttctgaagcttggatgatcggtaggtgggctgtactaaacaaatatactctccttttatgacattttccattcataatgagctgattaagacacaacaccatcacaagacaaggaactctctccctacattagatccatcatcttgttatctggcaacccattctcttctcttccaaactcttgctccggtctgtaatattgtgttgatatgttctatgtcacagtgagtctctccttcaaactggaaggcccagcagcctggaagccacatgaggagaagcgccatgtctgattttctcacttcaaacctagtacctggtgtttcccaataagtattttttggtgaatggatgaatgagcatcttcattttaaaatcaagtctcagcctgtgatgtaggcactagtgccattgttactgtttctatttaaaaggtagtaatccaagcaagattcaggaaagcttgggccccaagattcactaggtacttttctaaaactgaccatcttcccagcaaccacatattcagtttccctgcagaccttttgtttcttgccaggggtaccagcctgatggcttttcagcatcagagagcttgtgctcctagtgggttccacatggaaacaaatggttagaaggtgatttgataaatgctttaatagggttttattttaactctgtctggaagaccctcaatctgggaccagttggcgtagtggttgccgacaacagattgaagcaatttcattggctggataggccagtagagaatgttctatacagagaaagagtgaaggaatgtggcttttttttttttttggagactcgctggttcagtgagtgggtgtgtgtgggagaaggatggaatggatgaagaggaggtggacaggtccagatcagaggtgtatgaacctgtgagtggcttggtgttgtcgccacaattctaggctacagttcaattgtgaacggggaggaagacattaggagcctgaaaccattgaagccattatgtctgcagtcagaagggggcgatgaatacatgcattgcgctcaacttgccttctccatcttgcatactctggggccccatggctggggaatggtcccacccacaattaaaatggttcttcttaatgaacacagtcaagacaatccctcacagacattcccagaggctaaccttaatccagacaatcctgcaaaggtgtgtctgtaattgagaattactactacccatcataactaatataattgctcccttggttagacactgctatgtaaacctccacctgagcagactgcttagaaatttgtctgcaggatttgaagaagcatgcagccatgtttagcaactgcctatggaaggagacaggtgacagtggtccctggtgactagtcagccagaaaacagtcctgggatgatatggaactgaattctgccaagagctccaacccctccccccaaaaccacattctggtcagccttatgacccctgaagcagaggacacagctactacagttctgaacctggacttccaaggttcagaaaccacagaacaataaagaggtcccctctgtttctggtagttagttgttcagtggagattacgaatataacaagaagccagtgacccaaggacagagccggtgactcagagaagcaagtagtcgtggaaactggattcagacagtttcccatgaactctctgcgtgggtcagtcaagcctctctctctctcactttccaacttagcaaattttgcttcagaaagatcattgtgtccaccctggattgccataatgactcattcccaccacttgccaatctgtccatgggccttggttttgagcttcaagaaggcaggcctcattccagaattttcctcatctttgactgtgtgtgtgtcacatggtgaatccatcacaacagtgctgcctgaaggactgaaggaaaggatggtgaggacagtgtgtgtgtgtgtgtgtgtgtgtgtgtgtgtgtgtgtgtgtgtgtacatatgtgtgcagatgagcatgtgtgtgtgtgtgtgtgtgtgtgtgtgtacatacatatgtgtgcagatgagcatgaatacacacatacatacatttgcgagccagaggctcacacagatgttttcttctgtctctgtccaccttccatctctgtcctactttttaaggcagggtctctcactggacccagagctcactgattttgctaagggactggctggaaagctccacagatcctcctgtctctgcctccccagagctaagattgcagacatgtacctctgtgcctggcttttaaaaatgtgggttctggggaatgaacttaagccctcatgctttcatggcaagtgtgttactgactgagccatgcccaggccctcacggtcttcttgtcttggttccctgagcttctacaattatgctttgggaggcagagtataaactgcctcagtggcagtttggggtctgcacagctccatggcaccacaaccctacttaatatcagaaggttctagaaagctctgtgggtgactgtagttgatcctctccagggacaatggctacaggcaaatggaactaagcttggggaggaggcaggtgagatgtctctgtctaatagccacagggagccggggaacacggtttccagtggcctctgagcatgtctcagagctcttcagagtccatcatttgagagcatgggaaccatgcaagacgcagagatatgacaagacctgtgagatcccagtttataactgagctacagaagttcacctttggcccatactctcgatgaggagagcatagagttgattgctcaatgctgtttcatttcagctttgggtctgttggaaccaccttcttcctccacactctttctctgcaaagccctgtatttccaggagtcttctgggcacacctgagtggccagacacattctttggtctagctcccctctctgtttctaggagtgggtgtgggggagattctggcctcttcctcctgaacagtcctgtttctatgctccccactctgcaaagtcccagctgagatggaatgtggtgtaccttctcagtgaatgcccagcagttggagtaagctgtctctgaagattcatgagtcacacttccaggcacagctgcagggctactgtgatggcaagcaaagctgtgttcttcaggctcccctgtatggcaaggagtgtggttcaggaggggacctgttattggtagggggtgctggactttgttgcctggcaacaccagtaagttttccttcctcttttgtttatgccatgagcatgatttattttttaactctttaccctgattttctgtaaacttgcacattggtgtcagagaacacaccgctgaaaactgtgaggagggcctgaggagacccacacatcacacattttctaccaactttacgctctctataagcagtgctatgaggttcaaaggaggtagccttcaggcaaagacaaaatccagaaacccttgtcattggagttctggtggagtacctctctcctcaggtgagctcttgtcatactttggagcttttgtttctggtagtctcaggtgaactgtgtgcccaacccatcagtggctttctggttggcattgtctttggctatggctatggggtgggggttacaggatgggtggtgtagaaatgggctctgtgacccacactgtacctaaacttgattctttttaataatcaagcttcatcctagccttaggtggtggtacaattttggtttaaaaaccaaacaactactgtggtaataggttttgattttaaatccacttgacctaaaaagactttgaccgtattgctggccacttcttccaaactgcccctgcaacatagcagtcgctctggaccttttcatcccggcttctcatgacttggaggactctctaatctcttcagttggctcccctcaccacttccataacaggtggtcctgataaactttcagtcctatggccatgttgaagtcttgtgggctggttgcctgtccccccactcttggcaaacccatttaacagaagcagaacagctttgttgttatattattatatcttagctgggatacctctgtgtaatcatggctgccctagaggcagaatttatccagaattccttttgaacatctctctcttggcagtcccttatctatagtctcattggcattgctctagtcccagggttcatctgtttgtcctctcacttaactcctgcatgctgaatcccacacccagtggcttcctgagcttgagagccagctatgtcctactcactcaaagcctaggctcccgtgtctcttagttgtgtactctgggacgagtttttcaatctctctaaaccttagtttttgatctgtaaatcgggaagaataatacttaccttaccaggttttgtcaggattaagataatataacgtccagagaacaatatccaatgagatgataggtgacagatgggtcactggggttctctaggggagtagaatcgatggaatgattataaaaggggatttataagacgataggagttaggtagtccagtaatggctttatgtacaagacagagacagagaatccagttgctactcagtccacaacactggatccctcagtagttctaatccagcaccaaaggcctggagatgcctggagagtaactggaattgacctccacactggaagtgcaaagatggctggagcctgatgtcgacagaagatggaggcagctgctacaaatacactgctcaggaagaagtgaacacagatggtcactttcccctcgaaactctaaggctgcctgtgggaaggcaatggctgctctgagggattctcctctctcagttaatcttctctgggagcagcttcacagataggcacagaggtctatctccttggttattctacatcctgttaagttgacaattgatgtcaattgtcacagaaagacagaggatagacaagtgacagatagacaggtatagatatagatagaagacgatagatacatagatagacgatagattgttgactgataggtgataaacagatagtgatagatagatagattaggcacataggtgggagggaattttgtagggaaattggctcacatagttatgaatgttgagaagtcccatcccaccatgtgcagaatggagaactctgagattgtatcatggcttagcacaaggttaaccctgagatctagagtagccaaagatgcagctcttagcctgaggccagaattcttgatctaagaggtcattggtgcaagtcctggaattcaaagggtcaagaacacaaagaactcggagttctggtgtccaaggccatgagaacatcagcattccagctctgagatggaagggcgggatttttggttgtaagcctcacctttatcactgagccatctctccagcctgacgggtagaagaattaatggaagagaggaaggggaggagaaataagggagagagtagaagaaaggtgaatgcatgagtttgcccttcggatttttgttctatctgggctgtacaaattgctcagcaatgtgacaaatacctgataacaacttaatggagaaaaggcttgctttggattctattttcagaaggtcgaagttctatccatcgtggcaaagaagacatggcaactggagtgtccttgtctgtgctggtgagagcattgctgtagctcctcccatccctttgaacctagaagcagaaatagaaggcttgaagatgagagggtgggtgggtataagcttccccagtaacctaatcccaccagctttatgtacacagccacccaaaacagcaccaccagctggagaccaggcattcaagcacaggaacttactggctgtttcaaactcaagacagaccacaggccctcgaccatttaaaagatgccaatatcactgcatgagagtgggtttctcacttaggctggtgatttcaatgctattctcttccagaagaactctcacagagatgcccagaaatgatgcattaccaactgtctggaaatcccttaatccagtcaaattggcacgccaagttaaactatctcagtaggtaaattctctagtggaaacatagcaggcgaaggcattcagagccatgttacttccattgccagggcacagctgtggtgtacagcatcagttagggatgcaaggagcctatttatggaaatgaaatgacatacggaaaaacaaatgcaataaagtgtgatagtggtccccagggccacgggcaaggggaacctggaatcccaaacatcctacccgggaagagtccaaagtctcatcattgggtcagtgggggggcatgggagcatgggagggagagggaactgggattggtatgtaaaatcagattctttctaaaaaaaaaaaaaaaaagcctcatccaaaggcagtggttgtgtgtgtgtgtgtgtgtgtgtgtgtgtgtcctggcatgcatgcctgtttgtgtggaggtcagaggttgacattagctgtcttcctcaactcctttccaccgtagtttttgagacagggtctctccctgaactggaagctcactgattcagctagattgtctatccaacaagcctagagaccctccttagtgctgagattacaggtgtgctctgctgtacctgtctttttttatgggtcctggggattgaactcaggacttcatacttgtgtggcaaacactttaccaactgagccatatccccacccagagttgcactgataagggcaaactgagctacatcttcccagctctgtcacaattaagttcctgtgaccttctgaattcctcttagagacatagcctgtccattgtctctcaccagtgataacactgacctcctaaatggtctctgcagtattgcttcctctgctcttcagggagcacaccatccagcgagatcagaccatctggtgagatcagaccatccagtgagagacatcagaccatctggtgagatcagaccacccagtgagagacatcagaccatctggtgagatcagaccatccagtgagagacatcagaccatctggtgagatcagaccatccagtgagagacatcagaccatctggtgagagacaccagacaaattggtgagagcagaccatcttctgttaaaaccctggtggcagcctttgcctgcacttggagtactgcttagacatcaaggtcctgtgtcctctgccaccaggccctacaagctccgctcctgtacttctctgtaccattgacctgtggacgcaccagagtcccctgtgccccttctcccagcctctgtctctgcagaatccatggcctgaaaccccagaacatctttctcctccttggcctcgggcctcagctggagcatcagttcttggagacatgccccgtccatcgtacctaagcacaacccttcatcccccacccaccaggcttcctagtcagcatcttatttattcccttccggtgtgcttgatcactgcatattccgaataaggataatcattaattaacactgcaaatgagccacgttgccagcccagcatgtatcttttcaaaatgaggccagtcttcttggtaagcgtcacattaggatcgcacctaaggcatttaataagtccttaatacctgaacccagtccatagtggagctccccccgcccaccattagtgtgctgccaagataaacgagttgctcgtgtggctttacctcttctgtctctcctgccccaccagcgtttttcctggtaccagtttcagactctctacgcctttgtctcattgtttcttcttggtgggcatgcttgtccttccacacttgcatttattacagagtagggtgcagagtgggattctgttccccttaaacaggttgggcaatcttgggtagctagttagaaatgagcagacttgaagagcagggaagatggacccccttcccttatcatcagcttcaggcctgacccctttgtccctggtgacacactaatgttgtaagtgaaaaacaggggtgggtaaatgaagggaaaacaccacagttgcccctcctaatatttagaataacacccctagccagtaaactacaggcaaccggtgaatgctgggagaagacaattagcctctcccaaggttgagtctccttatcagttgtctaatgtgtcatggtcagccctggaaccatgtacataataacaaccaaacaggattcagcaggttgcatttgtattcatttgcacacacatccatacacagacacacatacatgcatgcaataataataacgaaaggacaaagtggctatcagcttgagagtgggaggggaacatggcagggattggaggaggaaagggagggggagagtgatgtaattctatttcaattaaaaacatacttagaaaatatttagaaaaccaaatgaaacggaggaggctggagcagcaggctttccctgatgcccattaaagaaaagtacttccctctggtaaagcatggatatttttatagatgtattaatttttctttaatcctgtataaactcctctgtgacaggatttttgcttggtcagaagaatgtgatatgagtcatatctctctctgaccctgggtagagatagggctttctgagctgccaggaaggttttaagatcactacccagaaggaagtcttttgggaagaacacagacattattgtccccacccaaatgggcctgcttgctagttagctataacggtcaagttgacacagcctagagtcgcctcagaaagagtctcacttgggcattgctctctgattagattggcctgtggaactgactgcgtgaggactgtcttgattattaattgacacaagagggttccactcctccactgtgggcggcaccgttccctaggcaggtggtcctgggctgtgtaagacagctaggcaagcctgcacccaccagcaagcagctttcctccatggtttcgacttcaagttcctgccttgacttccttcagtgacagaccttaacctctaggctgaaatcaacccctttctctctccaattgctttttgtcagagtgctttatcacagccacacaggtggaactagaacagcctgtcaatcacctacacaggcacgtgctcctgagaaagctgtctgttgacagactttagagaacagtcttaccatgtcgggaggcacggcagtccctttggccattgtgtactctgacaccacaaatgtgcttttttttttcccccagtggacccagtagccattgtctactctcaccttgccagtgtgtgtgtgtgtgtgtgtgtgtgtgtgtgtgtgtgtgtgtgtgtgtgtgtgttttcatgcaactgttcctttgaccactgtccactccatgaatgtgcctattctgtaattatctcttcccgttttcaacacaaggctctgtgtctggtctgaattcgtttgaaggagatcacaatgactgggtgtgggaaggcaggctgaggtcctggtagccacaggagtactttctagtgatgtctctgtgttgccccgtgttccattactaatgacaccaggtttgattgtgtggctaaggcagttgtcatgctctatttctgcccccttgagattagcaggcaatttgggaggggggtgatgtttggcattgtgctttttttctggttttgagacagggtctcatgcaggcctagaactagcaaaaaagatgactttgaacttttgattctcttgtctccactaactgagtgctgggattacagggggctggcacaccacatttggtatggtgctggagatcacacccagggctttgtggacttcaggtatgcgtttgaccaactgagccacatcccaacccactaatgttaattttgtccagtgtgtgattgttttgtatgtgtatgtgcacgtatgtgcgagcactgtgtatgtgcagtggcccacagaagtaggaagagaacgtagtattccctggaagtggagttgcaatggttgtgagctggcacgtggtgctgagaactgaatgaaggccccactggagcagcggtgttcttagcaccgagtcatctctccaacccctactgaccatttcttaacttactaagggctctctgtaaagcccttctcactgagacttggttttatactagttactgaacaaccaaaaaagtcttttaaagtattttattagttcttcgagacatttgtacaacttgttttgatcattttaatgctctttcaactcttctcataccctccactccccatccctgctaaacccatcggggccaatttttgctgcccaaatatccttggatgtgtggtccttccccttgagggcggttgacttacggggctacattcttggagaagaccgattttccctctcccggaagctaccgactgcctttaactcctgttttagaggtgggacgtcatgctcacttcccctttccgggctgggattaggtgtgccttgggctgtcacagatcttgtgcagcctgtcacggcatggagttcatgtgtacagcttccattctgtgtccacacgagtttccttgtaggcatctacaagcatgctgcagtgtcttatttgagtacaggccagctgtgagtctccgagttaatcaccatccacagggaatagaagcttctgctatgagggttaggagatgcactggcctgtgggtataaagtcacaggagtggctgtagtactgtgtctgtttgccagagtgataacagtaggttctcccttatggtctgtagctcaggttcttggcccgatgatggttccatgtatgggcttcatcgtgtggagcaggacaaacctgacttttaagcctgctgttgcatgccatgccatgcttttacttcctgtcctctgcatgcaagcatagctgctgtctttcccacatggattgtttttaccttctgctccgtgttagaaacaccctctctcttgttccctttagagaacactaggccctctttcctccttagtttctgagaaagaaaggaaagaaagaagggggagggaaggtaaagagagaaaaccacttccagagatctgggcactcccccttccgtacagaacagcactcgttcccgggcctgtcctgagctccttctccgcagagctgtgactacagaggagactgaggctccatgccacacctctctattccttcaactgcttgccagattctctccccagacccatctctggacactgggtcagagtccactccccacatctagctctcccctttggcctgttccagcaggctgggctggtcccttctccagccttccctccctggttctctgaagtaccttctgtagagctggctggtgccaggacctccctgacagcacctcctcttcatcccacctcctcccactgcctcagagtctagacacagctatatggagagagcagtgctgatgagggacaaggggtggacagaacttagttctttacaagccgacactctcgtccagctgttcagtggtccagtcaatacagatgtgggattttggaatcaagacctggcagtgtggaaggggtaagggtcccttttctgcccctattgtgacgtccagcctcgtgtctgcctctctttggccctctcaattcgttcccctccgatcttcatcagcattatagtgggaagtcatgacatccatccagactacactgagacatttacctctcttggctacatcttagttaaactgtgttctctcagagagaatatatggtggtgaacgtgatggaccaatcaggaaggagcagacgagaggccagaccattggctctctgggaaataatgacacccatgacctactaagcgtgacaagtgaccatttaggctatgatggagattgcaaagagttttctggaggatggagctgggaagagacagcctctgagctgctatggttgttgcagaggacaaggatatgggagaaccccgaaaggtatgaggaacctgttcccggaagcatggctagcctgatgcttggtgaagatggaacccaaagattttatgtttgcagttcacagattcaagtcactcagctgccgctgcttttcctggtgatgacacagtggagagccaggtgatctgaaggtgtcaggtgacttcaggatacaagatttctagatgtcaaagatgatttcactaagagcacttgagggagatgtgggtagacgattgctccccaaatgacagcacatccctcagcaccctctatcctagggaatggcttgtccctgtgccaccacagctcaccagccctgtgtccacaagggccctacctcacagggccccttggcaaggtggtcatagagcctgtctagtttcagacactctcatccataaatgcctcagagtctggtcagaggaagtctggggagtgaggtctctgcaaccaacatggccagcagggtgtgatccataggtggcatgaaggcagttcagttcaacaggactcagtagccagtgttggttcaaactttgagagtctgacttttaccatgagtgcatgagtgctcctgtgtgcatgcgtggacaactttgtggcgtctgttttgacttccacctttatgtaggtcccagggattgaactcaggtcagcaggcttgtagagcaatctgcaagcacctcgaactgctgatccacctccctgagccttgtgttaaatccttgcccattgggtggcactgttttgggaaatggtagagacttttggaggtagggcctggctagtgaaataggtcactgaagcttatacaagttaccgcttttctgtcttctattagctgtgaagtgagaccctcaccacctattggcgtggtattctgctcaaccacagacctagagacaaaagttccagccaggatatattggacattttgaaaaaatgaatcttctttatggtgtttctatcagttatttggccacaattgttgtaaaaaaagaaacaatacataaaaaaggaaggcacagtcagccagacatggtggcttatgtctgagtctgagggattgaaccccatggaactctggacaagttgagctgttcagagccagctggggtgtgggatgctggcagaccccattatctcttttcctctctgcccaggtcttccctcttttccaggttgctcctcaaaattataggcttccaggaaggcaaggaagacattcctttaatctcagcacttgattgtccatatttataaatgatatgtttacttgactttttttttggcaaagggagatggagcactatgaattctaggctaatcttgtctacatagtgagatctggtctcaaaacaaaacaaaaaaatataggtgttcactttaccactccagagtgtggttcaggtgaattggcccacatacttcctcaaacgttccctagccagccttcgtagtagctatggttttcaaggtaaaagaccacacctacacaattcacacacacacacacacacacacacacacacacacacacacacacacacactcacgcatactcacaacacacacacacacacatactcacacacacacacacacacacacacacacacacacacacacacacactcacactgttagacccccggaaaaaatcaggtatccaggtcccagcccatgacctggatcaccccaatcaccaggcagattcgagagcttgatgcaaactgcatgaggctttattgttttttaacgcgctaaccccatgttagctcgggtatttcacccaccccccatggtggatggcttgaaaagacacctcgaactggctgccgagcgatctcgtagggcagcgtaaggggagtgtctaggggtacgcacaggctcaggattggtgtgcctccaggcttggagggcttgccctgtgttgattggccaattggttgttatggcccataggccctcccagggtggttgctatgctctgcgtgtcattgctgtgcactcgtccgtaaagtacacccagagtcgtaaagcatagcgccaccagctaacttctgattggttccttgtcatgaggcaggcacctaacctctagtgactaaaacaaggtcatatcgagcacatgtactgtcatggctgctgaaatggggggctggtcccttcaacacaaacacacacacacacacacacacacacacacacacacacacacaacctcagaggaaacttaatgaaagatttgtgaactaaagcagaatccttctgttcatgcatgtctacttaagacataaacaagaaacaaaaagccaactctgagaaatgggttagtgatgtacactgccaacaaaaagttgagaatatattcattatacaaataaagatggagaccaagaacacaatacgaagatgggcacaggaaaccaacaagcagtggtcgggagagaaagtgtcagggaccaacagccttgtgaatattggttctgctgcggtaggcaccacagaaacaataacaaaacaaaacatgcctgttttcttcaggaagggatgtcctctaaatattagggcttctttctatctccctccttcctaccgagatagaggagtggctggtcatggggtgggcattgcctcacattttttttcttgttttgttttgttttgttttgtttttcttctatgtgaaactcaaccgaaaaaagatcccgaatgcagaagtgtggtctctctcttcctctctgcttgggctagcgggaggagcagcttgggagagcactctggtagattcattcttccctgactaggctgttccaaggtcaagccccttgggtgcttgggcctctatctgcaagccatttgtctttatttcccagctggctcgtaacttgggcaagaaacagccccgttggttggtttctccaaagcctacatacagattgattggcaacaatggggaaaattttaatgatgcctcatgccctcaggagcaggaacaacagggctaggtgctgctgctgagacagtaaattgactggccactgtgagctgtaattaagcacggttaaaatttaaagatgtgcattcctggggcagcaatccctcttttggaaggctctcctcacatgaaagtgtgtgttcattcagtgcagtttataaaaatgagaaatctggaaaccatctcagttgggaagccccgcccatccctgctcctctcattccagaccctgcccccgagaaagcccgccatcggcagcccctcccctggaactgctcaagaccccctattgctactcaagaccccacccataggcctgccacggggggcccttctgttctgtccccttccttcctgagagccaccaggagtgctctactttgcattgccctgtttttaaaatctggatttattaattcggtttgatttggcttattgcattggcggaggaggagcccagtaactgggaatccaatttgtaatgatctcaggtattctccaaaggcagagtgaacaaataatgtagctacttcagacagcggagtgtcacacagctacactcatcttttatcaatatggatacattaaaaaaatattcagggttgaggttggaaagatggctcagcagttaagagcgagtgacgctcctccaaaggactggagtttggttcccagcacccacacagagcggctcacaactgcctgcaactccagcttcatgggatccaacactctattatggactccacaggcaccagcatgcatgtgtacaaatgtacacacacatttgcataaatacataaaatagcccttaacatattcagtgatcaaaagcaagttgtcaaagaaagtatatcgtatgatagcattcaaataaaagttggaaactgcatggagcgctcacgcatatgtgtgtttggagttgggtgcccgtggtttctataaggccataaagagccgctgctctatcttaaacacataggggcaagatgtattttaatattttgagttgtttggattttagaatccccacacaggctatagatgatggaattatgtttatcaaggtaagggggaccaaaccatgtccgtataccttaatgtttcgaagtgaaataattaatattccaaagtaaaatgcatcgattggaatcgagacacacaaagtccataaataacttcccgtctgtttgggttctgtcctcagctaagtttgtcacacgtttacagaatcagcaaacagacagagcctcatttgtatctcaggagtttggggggttcagatttgtgaataagagggtgcacatctaggaacagagtcacacagaggggctgggtggagctcagtgatagactactcccctggcataagcaaggcccgtggtgggtcccgaccataataaataaataaacaatagccccaaccctgctataaataccaaatgaaaacgcatgaatgaaagcagcatatgcagattgcatggctgccaacaggagcacgagccagttaggactggggctgtgcttataatggcgttttacttttttaaggaagcacctgtggcgagaagctggaggtttaataaaacttagtggtgtggacaagagcatattattctttacagaattctgcatgtttcttaaatgtgtcataataagcagtattgagtcttcatagcgtctaccccagagagagaaaatgagttttccaatcactcacctggttggtgatagaactggaatttaaattctatttttttttaatccgactcattccactgggagaattgagatattaacctcttgtaaatgaaggtctatgaatcaatgaattaaacgtcagttattttctcagaagaacctgtagtgtaaataacatgacaaaaactagcttagattcacactgcagcagagcccagagccagtgagccttgtgccttcgtcctgtgtcccaacccgttccctgtggcagggaactcacagcccttagcccatttgtctctcaaagtcacctcacttaatggcttggagctgttcttcattcttgtcttctgggacgtgggtctgtagctgacatctctgacctttggggaccccctcaaggttcctgcttctgtcccgaagaccaccagcactgtttttaggaacacagagcttcaagaaaagtcatgctatggggccacttcctgtaccgcaccccaaccagtttttacaagtgataaaaggaaaacgaacttccagggcagaaaacacaaggtgctgtgccaggccttgtatacatactactacataccgtcatcacactgtaccagataccattataaatgacaccaggccactcgtgtctcacaaggagcaagactccagcagccttaagctctctagtgacttcattcgggcagccggaagtggtaagatggctggagagaagtcgtaggagcatgagccttcttaggaagtgggtcctgggtctttgtgcttagttccaggtgggtgggcttctcctttgtcccctagcccagcatactctcgatctcctagaccctgatcagggactccctaaggaatatgggaaaataagctcatagactgaaattctatttttttttttaaaacctgacacattcccatggtagatttgaggtgttaatctcttgcagatgaaggtctatgaatcaatgaattaaactccagttattttctcaaaacaaacaaacaaaaaactacagtgcaaataacataagaaatcagcgcagaaggtaaaatatagaaaggaggaagcttggttgatggttcattgggtacagggcttgctgtatgagtgtgaggacttgagtttggatcccacataaaaaggctgggtctggtcacacctggctttaaccctagggctgaggcaggagaagggccaaggacaagcagactgacacctagaactcattggccaaccagtcaatccagtcagtgtgtgcccagttcagggagagaccctgtctcaaagacaatgggaaagtgatagtggagttaatggaagataccaggacatatatacatttacctctggcctccatgcttacattttatgtgcttgagtgtacacacacacacacacacacacacaccatgaaagggaataaatgtaaaagcttgagaattactgggaaaaaatcccccaaccttggacactgtgttcatgaagaactacaaccaggtgtaagaggaacttgaaaaacagtgggttccatattagggattttatttttcttttaatacaaagagtttcagagctggatgctcggggcatgttccaaaggctcagaggtgacagggccaagtttattccggaagcagacgtggagatggggctacactcccaggaaagtagaaggagaaaggtcaaagctaagagaaggcttagctttgttgccgtaaggtgctttgtccctgtgatgtccacttgccatttctgtttacacttccatccagaatggacagctggccatgatggccaggagatgccagcagttactgtcaattctctggtgggtctcctaatagaacctggcttttgttagtgaggaagaaaggaagtacgctggtttgaatggtaatatctccctcaggcttgggcatgttggtggagctgtttgtatggcttgggaggagtggtcttactgaagaaagagagctcactgggggtaggtgctgaggtttcaaagccatgtgctattcccacttcattctctctgcatcctgctctaagtgtgagatgtgagtcctcggctctctgcttccagtcctacccagcattatggattctagccctctgcgatcacaattccaaatcagcccttccttccatgagttgccttggtcagggtgttttgccgcagcaatagaaaaataactaagccagggaatctgttagttttcttgttgctgtggcagagaccccagaaaacaatgtagggggatgattttttattttgttcatcaaaggttccagtccatcatggcggaaggggcttgcaggagcaccatgagaatcactggagcatcgtggacaggaagcagacagaacagcactagcggggtggctttcttcccacctcaccccacacttagcctagttcttctcccttaggaatcctccctggaaggcctttgcaggtgcatctagaagtgtgccctcccagtctcccaggagatctttgatccaatcaaattgacaaccaaggagaaacagcacaaggaatatcactattccatagcaacgtgtttctgaatccaccaggcaggggaggagaaagggactttactcctgaagttttggagcatactcttaggtggtccaaaccatcgaaatgctgtactcagttctttagccccttattgcaaaataaaggcaatgctttaaattatttattgtttaaagtgcttaactttaaaaaatccaagtaatttctttttaattttcttcctttctttctttctttcttttttttttttttgtctgcttcacttttgtttttcagacagggtctcaccaaatagcccaggcttgtcttgaacttgaagaaatcctcctgcctcaggatttccaagtatcatcatggctgggttcctagaaacccttcatcatactccgagaggatgtctcacattcacaattcacactcactcactctgagaagacttctcgagttcacagttcacactccgagaagatgtctcacaatctttttttactcaccccccccaggcgtctgttgaagatagcatactgaagacacttagcttaccctgggaggagatgagggaaggattcggtttgttctcttgtgggaagtgccagcacatccctagagccccttgcgcagtcctggcactagcttgtgcactcggaggtgtttttctccctttaatgtcctccagggctggtttaagctaccgaaagtccccctcccctgcttcctctctctcttcttcttagctttatgttctgtttttgagtttcattttattctatttctttgtgtggagtgtgtgtgtttgtagtttgtgcaagtgtgtgcacccacatatgggtatgggagacagagaaggatctagaagtcctactctagagctctcgactgtatttccttgagtcattgaacctgaagccccccagtttagctctgttgccctgctagggagctccctggatctgcctgtccccgtccccccaaagctggggtcacaagcatgtacagctgtgcccagctttaaatggatgccagggattcaaacccgggtccttgtgcttgtgaagctcttaccatggcattctcttcccagcttgcaaacagcagcacttcttgcaagagatacatttatacttaggggactttggggtccatggcaagttgacacggcagcctgggtctgaagactgtgtgtgtgagtgtgcatgctctctggtctgaagtgggcagctgtataggtgttggagggagtagaagtcctttaagcagttatttgagctgtattacaaaaccagcacctatggcagatccggtaaagcagatggtgaaacggggacgtacgtgtgagtgatttattgacaaactgcttcctggagaaaagaggaagggttgggtggagaagccaggactgagaggacacaatgccaagcaagagtggcttcagacagagatctccaactccgccaattctacctcagctactgccccgaccagaagaggggagacctgttagaaagaaagggagaccaaagccggagaagaatggggacgaggagtcattagggactcgtgagaaacttggctgagctcccatgaagtcaggcatgtgcaataactcagcagtcccatgctctaacagacggcagccccgcaaacccatgagtccctgggagaagcagctccatgcttctgattgtggatgggattcctggttcaccttaccctgtaggctgggttaagcccatcccttttcatcaatgtgagactctagaaagaacttaaaatccactcattattctgctgattgctgtatagacaacatagcaaattgtcgtctgaaggaagaaaaaaacagagtcctgaaatcagtgatttccctttgtggtggtaaattcgtggttttcttgtacaggagtcttggtgagccgcggatcgatctgcctggaagaccacagatgcatcactgaggaaggaaaagatgcagaacacggactccatcctcaactttatgttcaacttgctgctgtcacaaagctcccccatgtaccactgtgcacagcagcacatggcccttctgtttgtgttgccacctttctgtcagtacagccacttccagagatgatcaaggggacctaggagatgattcagccagtctacccgaactgattcattcactccatgtccagtgagagaccctaccctgcccccaaataaggtagaaagcaattgaggaacatagccaacagcaacctctgatcgatctacacacacacacacacacacacacacacacacacacacacacacacacacaccccacacacacacagacacacacttacatacaccacacacacacacacaccacacacacacacagacacacacacacacacttacacacacaccacatacaccacacacacacacacacaccacacacacaccacacacacaccacacacacacagacacacacacacacacacacacacacacacacacacacacaacacacacacacacaccacacacacacacagacacacacacacacacacacacacacacacacacacacacacacacacagacacacacacagacacacacacacacacacacacacacacacacacacacacagacacacacacacacacacacacacacacacacacacacacacacacacacacacagacacacatacacacacacatacacacacacacacacacacacacacacacacacacaccttaaaaaaaaatacaggtaattttgttgagaggtgttgtgtggtttttgtgttgtacttctaaaaaaaaaaaaagaaagaaagaaacactgtatctgaggcaacagccatgccagatatctcatcaagcccatacgtattgtattcatgtattaaaaagccgcactgtgcctcataaaatgtatgcttgttggtaaaacatttcaaagtgtgatatagtaggtcccttcttttagagctgacgtcatctctgctcctgaggacatttaatgggtaggaagacctgaaagacacacatgagaagacaattcacagtccagggaggagcatagggacaggcagaagcaccacagacccagattcaccagtttacttaatttttctcggcttcaatttcttcatgtaactgtaacaggagggtccctaatgtccacttgtgctatcagagcatgagtgttctactaaagtcaaagtggctggcaagagctcagcagtagggatgggctgaggaaaacctcgatttgtggtgggcgtgatttgcacacgacaaaatgcagttgccccaataaagtctgtgaatctgatcaatccttttaccaccggccttcgaaacttccttctatagtttcgtctggaatcataagtctgtgtcctttcaatagccctaacatgtttgagatcctcctatgttgttccacgaaatcagctttattgtttacagcccctgctgcccacgctccaaatgtctatcagcaagtagatagtaaaaaattatctgaagagagaagtcttggttttgacgactgggagttgatccctaggctgctaaagtgtcctgtgtgtgacaagagcacccttctcagcttggaaactttgaccagaaaacagtccaactgtggccattgttatttaagacggtatcgtgtagaccaggatggcggtaaactcactatgtagttgagaatgactttgaacttctgatcctcctgtctctgccttgcggtgtttggattatagttgtactcttccatgcctgtgttagtgtggggaccaaacccagggcgttgtcaatgctggacaagtactttcccaattaagctatgccccagccccaactatgatttatgatgggcctcctaggaggagcggtaagtcacatgggcagcctgcaattgaacacgaggacacggaccatgagaactcaggtgggcttcctcggtgccagcatcccatgaatagtgctatgcatcgatgctgggagagcaacaggtccctgaaggcggtgagtctgaacaaggaggcgttctgccctctgcattcaacctttggctgtatcggatttgcatccttcaccagcagcttcagctgtagattcagtgactgccagaattctacaagtctgaaagggatcctggggacccttgaagctatagctatctgataataagtgaaggggccccttcttaaatttttcatcttaattgagaacacgctatggggtatcttcccccaggcattggttttgtttgtttgtttgctttttgtcagaatcctggcaaatgaatgggcgaatgttggtgcacatagcaaagaattacctggagattgaaaaagaaatgaaccacagatgcacatgacacatgggtagatctcagaagcactgagccaaaggaccatgtttttaaggcatggattcagctacaggagactcggtcccctgtggacttactgcatggaatttccatgacctgcatatgaggagagcatcagagggaattagacagggcccagaggataaaggtatgggaagggaagaagctgttctcagacacaaggtaccctggaaagacacacatgacaggacctctgataccaaggggctggtgaagacatggccagaaaactggctggccattgagactggctttatcccgtaagttacatgaggatccaggagttcaaggagctgtaagagtttgctatgtggtgagaacaggtgttaatgaatttgttttatatcattgcagcagactaaagaaataggagcaaaaactaatgaagaacagggatgaccaggggaaaggtggcttgtcttgaatacggcagtcagcaatcagtagaaattttaatatctaataaggtcttaaattttttgatagtgattctatccaaagacagatttttttttgtatcaagtacatataccaaaacatatatactccaatgaaacaagacttctataagataattgtgttggcttgtttcatgtcaacttgacacaagctagagagtcatctgagaggagagatccccaactgagaaaatatcccttaagatcagactgtcagcaagcctgtagagcattttcttaattagtgattgatggaggagggcccagccaattgcaggtggtgccatcccggggctggtgctcctgggttctattagaaagcaggctgagcaagccatgaggagcaaatcggtaagcagctcccctccatggcctccgaatgggctcctgcctccaggtccctgtcctgacttctttcagttatgatctctgatgtggaaatgtaagccaagtaaaccccttcctccttaacttgcttttggtcatgatgcttcaacataacaatagaaaccctgactaggacaatactgtttcttcattaggtgcactgcgctcgtaagtagtcctattttgttttgttttgttccatttcatcccactccatcccattattctgtatttattctgaaaacaatgtctgtaatgacaactagatttcttccctggcataacataattcttttacttctgtgatgtagccacccttcttgagggcacagctatttctgcagagctatgtgaggggctgtagctgtgggtgtgattgacaggctgggtctggggtaggacaaaggtgcacgaatggactgtgcctctcaaggtatgctgtctcaagcttccctgctatagactagacaagtttctccagatttgtgtggagaaacttggtctcctttgtgatggtttcaggaagtggggcattgggaagatgtaacatgaaaaataaaagacccagagactaatattggggttcaagcttcaagctgaagatcagaaaagcaaagcagcaagccagtaactcttatgtcttcctcagactgaaaggtgaccgtttccaccaaacctcagactgtaattccagactgctatgctctcaacgtggctgaagaatcctgagaatgagccttctgcagaccctgatcttttatctctctctagtgctgggattaaaggcgtgtgatcccaactgctgagatcaactttgtgtgagctgtttctcttagcactgggtcaatctcatgtagtctgtgtggccttgaactaacagagatctgtctgcctcttaatcctgagttccggcattaggggtgtgtgcctggcttctatggcttgtggctgactttgctttctgaatcctcaggcaagctttaataaatcataaacaataagtcaccacagaaggtgattagattgcaaggcaaaacggtttcaaatgagatcaccacctttataaaagagaactggagagctcctttgtctcatgcaatgtataaagttagtctgaccagactaggaaaacctccttccttatccctcaaagggggccaaaggttgtggctggcacttctgaggcagtggttctcaaccttcctaacgctgcaaccctttaacacagttcctcatgctgtggtgacccccgaccatagaattgttttcattgctacttcataactgtaactttgccactgttgtggattgtaatataaatatctgctcttcaggatggtcttatgagacccctgtgaaagggctgttcaacccccaatggggtctcaacccacggattgagagcactgctcttaggtaagatcattcatgtgccgataccttgggaatttgtgtttttaaggacaagagaagtgtcttgcttttgccctttacatacagaaatttggcacctgctgaaagccccgctcatcacttagtgagtgtgtgggtcccatgatggagacagctcagacctcagaacaccacctccaagccaggcagctatatatgctgacggtttatactcctttaacctcccgcaaatataactcgctggaaatcaccttactctatgtgagaaggaggctggggagaaggggaggaatatggtcccgtgaatgtagaaagtcttcattctggccagtctgttccctgacttgttctgctgtccacctctgtccatcctatgctgcactcagtttccgaagaccagagataaggccattccaggtcagcatttatcgcatatgtctcttgtggtacacaccgagtcctctggggtcattcaaaactgcagagatccttcatacatatgtgggtcttcctttgccattggaggcttgctttccagagttaaactgatagccgcaggcttagggagcagacagagagtcaagcaagactttatgcatgttttgcctccactctgaatcacacctgcgctctggatgaagaggaaaagatgagaaaattatccaggtctctctctctcacacacacacacacacacacacacacacacacacacacacacacacacacacacacacttgggggatttgggaaacaagaatggagaagtagaggagaaaacagatgctgaagcttttggacattgctgaatattctcaaggaagatgaagaatagaagagaagcaaaacagaatgccagccaagccaacatgcatggcacagtcaagaccctgcttccccaaggaagggcttcattgtgttacaaaactgccatgagcaaagatggacggtgctgtgtacaggaaggtagaaaagtgtcttcctccactcttctactatccagcaattccctggaagccagttaagtcccaagaagccgatttttgctgtgagttctcaccccagacagatgaatttttcatagtgagtgtttttaatctagagaagagagtgtacaaccacacagctagtcttggggttctgacagctcaatgaaccaggaaagaatccccatcttccctgactctgagtgaatggtagggtggctgggagtctcgagccaggggaggagactggagcagagggtatgtggctggagaggcagccagggctttataaattaccaactcctccctctgccttagaatcacagagccgtgactggctgcaaaattaaatgaagagcaggcagcaccccagaggaaatgaagtgtcaggaagggcaggccatgccggtgaccagctgcaggccctgggagagtccagagccctggggtgggggagaaggagaaggggggaggggggaggaaggagagacagagacccatgactcacccgtcctttgttgttctaatacacacaatcaaattggatttctttcttctctctctctctctctctctctcctctctctctctctctctctgtttctctctgtgtgtgtttctctctctctctgtttctctgtgtgtttctctctctctgtttctctctctctctctctctctctctctctctctctctctctctctctctctctctctctctgtgtgtgtgtgtgtgtgtgtgtgtgtgtgaaggtttgcatagccccacaccgtccctgccaatccagctctcctttcattttcaaacatcactacaaagctgttttgtaggaaaagggtcctgactttaacactttgcgtccccgtgtcccagaatggaagagtgactagaagaggtggagcagtagctgcaccaaacctggaagagcaacaccccctgaagaaagcctgggagcttctcacagagctgcctcgggaggtccagaccagcaaatccactcacccaaaattgtgcccctgagtagataaatgcttcctggtattgtctaggatgggcaggtttgctcagggggtaaggccaagggtgactggggagatggctgtcagtggctgtacaagttcaatcccaagaacccacagaaaaggttggatgtgatggcctgtgcttgccatcctggtgctgaagaggcagaggcaggcagatccctggtgcacaccaggcagctagcctgatcctggagtcccagggactgtctcaaaaacagatcctgaagaaccatatttgaggctccagaaacatttgcacacacatgcaaccacacacacacacacacacacacacacacacacacacacacacacacacacacgggggggggatgtatgcacatgaggggtggggtattggtttctggtttctttaccagtttcgttgatgtcctcttctgggtggttcagttagatttctgggtccccatcctcccatctctgtctgcttttccactctacagtagtgtccccagctacaggaacttccctgaagaaatagcaaaccctttcaagtcttcagcagcaccaacccagaagtagcttctagtgaaggctgaactgagatgctattcctgccttcaaagggctttgcaacctggttggcaatataaaaatggtcatgagacacggagacgcacatgcatagtgtctctcaagggcacgcatgtcctgtctctgactggaaaggtctgtatagatctgtgtattctgagcacattggttgaaacgcatcatggccacatatatgtaccatcacccacactttcagaacccgaggtggctttcctgcatagccatcatagcatgacatagagacttgtagcctgggtggatttctctgagaggtctcagctggctttaacaaacagcattgtggaattaactgatggaataaagcagctattctcatccagtagccgctgcaatcacaccagaaagacatgtcctggtcccaggacatctctatcaatctgaatcaaattgaattcggccttttctttggatgagcttgaaggctagacacattagtcagcatcccatcactacacgtgagtatctgatgctatcgtcttgtgaaaggctcatcggggctcacagttccagagatttcagcccttgttcagtttgctgtctgtggcatagtatattgtggtgggggtgcatggtcacttcacactgggaagtggaagagaacagggcctagggccccaatactgttcatgacctcagaggcttcccactaagccctacttaaactttcccaacagagacgatctggggagcctgcctttaacacctgggcctttgggggatattctagtcaaaaccacagcagaaccctgtgtcctcactctgtcccttccgctgctcatatgaaagtgttttgcaacttaaagagagtccctgaggaacgctgctgtcttctgctggtcctttctagggataggaacttctttcaaatctccgaggttgcagtctgagccatgtcttccagaactctctttcggggaaaggcctcgtgttaaggttggcttttcctgcaggccaggagccaggtgctacagaattatggaaagctattccagagtatacgatgcccactttcagaagcctttcctagctccccgggttcagccagagtccatttatataaggctaaatgagagctcccccgtgcacagagaactctgacatccccctggataaacagttctgcaagaagaaaatgcaaattgtggcttaaagtcagcctccacttctgtgccaggaataccaatgcgccttaccttccagctagggcagtggagctgctggctgtttatgcagatatctgtcccacatagatttgtttcccgagacagttagaacaacaaatagacgattagctacttgcttcaggagttctgcagggacagcagggcgagagactgatctcaaaacaccaggtcggtgacatgaccataccttagcattcatcagggaagcattcaaaggaagcttggaaggaagctgtaggcagttggtaggttggctggtgccgagctggggccagagggcttcagagtcaagctttcctggtcaagtttctgttaagaatccatacaggtaaaggtgtgcaagaaccaagtggaaagtcaaagaacagcatgtggaaggcataaagtatcagctctaggcacaatgtgcttggcccttgttaggcttcttctttctaaccaccaagccctgccaggaacgctggtcttttcacctctcccctttctgctctctgtctctctctccctttgctgtccccccccccgcacccctcccccttccctttccttttttttttgcatctcccatgctacttctctgcttgtcgatggcttatttccttggactggtggactggaaacccactgcgtgatcactctttggttgctgagcctttacctggtgacccgtggccagctgtgtatgacatggaggttgtaccggacagcttggtggtgtgattccttccactagaaggaaggaaatgaccccgttttaaattgttataagctatctaatcacaaaaccttctgagtttctagccactgtatagtaaacagcaatgcgactcacagtttacatagccagtctcctagtcatttgttatctgaaggcacaaatagttctttccctaatacatggtttgggatgaatcaacagaaaccctttaaatgcaaaacaaaacaaaacaaaacaaaaaacaaacaaaatcccccaaaacttagttactacaaaccaacaacaaacattttatgaaaaaaaaaaaacaaacccggggttacttctatcaattctagaaagagaaagttgtcaccgttgctgattaacatagctctggagaattgaaatgatgtagtaagacagaaaaatgagttgattgcaaagaagataaatatatatttacaggtatctggacaaactaagggtttttaataaaataatattaaaattagtgtgagaatttagtagcacagatagataaatatatataaatacagagctttgatcgatggaagcaataaccctttaggaaggaaagtgaggaaaacagcctattcataatagcaacaaacagtatacagtttcaaaggttgtatttaacaatgaattgcatgctatttataccaataaaatgataaaaatgtattagcggacataaaaaaatctcttagctaatggagatgtacaagccatatttttatgtggaaagacttaatatcataaaaatgacagtccttcaaaaactaatatataaatttaagacattagaataaaattttaatggcactgtagattcctgctttcaaagatgagataaagtaatttaaagttttatatgggatgaaataattggaaattccaagtttccagagaatcatgggatgaaagcacagatgaaagagaacttcaggagacattaaaacccagagtcaagctaacaggaccaaccaactaccagaaccaaccagcttcctggaccaaccagcttcctggaccaaccagctgcttggaccaaccagctaccaggaccaaccagctccctggaccaaccagctccctggaccaaccagctaccaggaccaaccagctaccagaaccaaccagattcctggaccaaccagctgccaggactaaccagctaccagaaccaaccagttccctggaccaaccagctgcctggatcaaccagctctctggaccaaccagcttcctggaccaagcagctgccaggactaactagctactagaacaaaccagctccctagaccaactagctaccaggaccaaccagctaccaggaccaaccagctgcctggaccaaccagctaccaggaccaaccagatccctggaccaacaagctgcctggaccaaccaggtgcctggaccaaccagctaccaggaccaaccagatccctggaccaaccagcttcctggaccaaccagctaccaggaccaaccagctaccagaaccaaccagctgcctggaccaaccagctaccagcaccaaccagatccctggaccaaccagcttcctggaccaaccagctaccaggaccaaccagctaccagaaccaatcagcttcctggaccaaccagctccctggaccaatcagcttcctgggccaaccagcttcctggaccaaccagttaccaggaccaaccagatccctggaccaaccagctccctggactaaccagctccttggaccaaccagcttcctggaccaaccagctaccaggaccaaccagctcctggaccaaccagctaccaggactaaccagctaccagaaccaaccagctccctggaccaaccagctccttggaccaaccagcttcctggaccaaccagctaccaggaccaaccagctcctggaccaaccagctaccagaaccaaccagcttcctggaccaaccagctgcctggaccaaccagctcctggaccaaccagctaccaggaccaaccagctcctggaccaaccagctgccaggactaaccagctaccagaaccaaccagctccctggaccaaccagctaccaggaccaaccagctaccaggaccaaccagatccctggaccaaccagctccctggaccaatcagcttcctgggccaaccagcttcctggaccaaccagttaccaggaccaaccagatccctggaccaaccagctccctggaccaaccagctccttggaccaaccagctccctggaccaaccagctaccagaaccaaccagctaccaggaccaaccagctcctggaccaaccagctgccaggactaaccagctaccagaaccaaccagctccctggaccaaccagctccttggaccaaccagcttcctggaccaaccagctaccaggaccaaccagctcctggaccaaccagctaccagaaccaaccagctccctggaccaaccagctccttggaccaaccagcttcctggaccaaccagctaccaggaccaaccagctcctggaccaaccagctaccagaaccaaccagcttcctggaccaaccagctgcctggaccaaccagctcctggaccaaccagctaccaggaccaaccagctcctggaccaaccagctgccaggactaaccagctaccagaaccaaccagctccctggaccaaccagctaccaggaccaaccagctaccaggaccaaccagatccctggaccaaccagctccctggaccaatcagcttcctgggccaaccagcttcctggaccaaccagttaccaggaccaaccagatccctggaccaaccagctccctggaccaaccagctccctggaccaaccagctccttggaccaaccagctccctggaccaaccagctaccagaaccaaccagctaccaggaccaaccagctcctggaccaaccagctgccaggactaaccagctaccagaaccaaccagctccctggaccaaccagctccttggaccaaccagcttcctggaccaaccagctaccaggaccaaccagctcctggaccaaccagctaccagaaccaaccagcttcctggaccaaccagctaccaggaccaaccagctaccagaaccaaccagctgcctggaccaaccagctaccagcaccaaccagatccatggaccaaccagctccctggaccaatcagcttcctgggccaaccagcttcctggaccaaccagctaccatgaccaaccagcttcctggaccaaccagctccctggaccaatcagcttcctgggccaaccagcttcctggaccaaccagttaccaggaccaaccagatccctggaccaaccagctccctggaccaaccagctccttggaccaaccagctccctggaccaaccagctaccaggaccaaccagttaccagaaccaaccagctaccaggaccaaccagctcctggaccaaccagctgccaggactaaccagctaccagaaccaaccagctccctggaccaaccagctccttggaccaaccagcttcctggaccaaccagctaccaggaccaaccagctcctggaccaaccagctaccagaaccaaccagcttcctggaccaaccagctgcctggaccaaccagctcctggaccaaccagctaccaggaccaaccagctcctggaccaaccagctgccaggactaaccagctaccagaaccaaccagctccctggaccaaccagctccctggaccaatcagcttcctgggccaaccagctgcctggaccaaccagctaccagaaccaacctgcttcctggaccaacaagctgcctggaccaaccagctaccaggaccaaccagatgcctgggccaaccagctccctggaccaatcagcttcctgggccaaccagttaccaggaccaaccagctgcctggaccaaccagctaccaggaccaaccagcttcctggaccaatcagcttcctgggccaaccagctaccaggaccaaccagttaccaggaccaaccagatgcctggaccaaccagctccctgggccaaccagctgcctggaccaaccagctaccaggaccaaccagcttcctggaacaaccagctaccaggaccaaccagcttcctggaccaatcagcttcctgggccaaccagctaccaggaccaaccagctcctggaccaaccagctaccagaaccaaccagcttcctggaccaaccagctaccaggaccaaccatctaccagaaccaaccagcttcctggaccaaccagctagcaggaccaaccagcttcctgcaccaaccagcttcctggaccaaccagctccctggaccaaccagctctctggaccaacctgctttgttatgggcagtcaggatctaggctgggtgttgccagattcttggtctcttatgcaaagaaatgaaagcaaggactcacgcagacttgcaagagtagcaagaaaagtttatttagagcaaagggacagtacagattagagagagatacactgtcaagattgacaacacgccacacaaatgagagttcgttactaaaggacttagtgagggtggcttttcatcatgtatcggcagatacatttttcctgtaagagactggtgtcagtaattacgggtcaaacataataatagaaatgacttacttaagaaaaacaagcctgtgtggtagtatagacctgtaaccctagcccttgggaggaagaggatcaggggtttgaggtcactgtcaattatttactgagtttgaagccagcctggcgcaggggtggtacataagatgtctcaacacaacgaaacagatgaaggtctgtatatacttctgttaatacaaggagataaagggtattgtcacaattactggtcaacactgctttggaggacttaactaatataataagacaggacaaatcattgactagaataaatgttggaaactaagataaaaatatcttccaaaataaggcaactgtgccacaaccatgcatgaaaacaagttctagtttcactaatattaacttgtcaaaataaaacatttactgggtagaataggatttagggacatattttatacaactttggggcaggagaccactttctggtaagccaccaagacagggtagaaacagggttagaggtaagccctagcctacagcacccagcatttacaaagctctgggttcattccccggcactgataaaaaatgataactatatattgactaagtggaaactaaacatttcatatatcaggaaaaaaatccatcagtgaaattaatgggcaagccataaaggcagaaatagattttctagtatataacaaataagagggtggatatttctcaaaacattgaaagactctctataaattaatgtgtttttaaaagacaaatttcaaacatagtaagacaatgacaaagggatgtggattagcactgtgcagatgaggcaaagctacacatctaatactgcatgaacagaggcccagccttgccagccatcggagaacacagagaaccaactagattctacaattgacattttactatgtttatgtggttactttgtcacttgtctacccatctatttattcagccctctaatccatccactaatccaccgtagttttgaacatatctcggtgtaaactgtaaactggtacacgtcccctcaattgagcacacaatcattaactagggttcaatagcagagtagatttttcttatgagtgaaatgtacatactgcacaatgctcacatcttaagagtccatttattgaattctgaaagagcaaacagttgtgcaaactgaactcctatctacaaagtcccctgatgtcctttctctgctgattcctgcccctatcacccagaggcaattgctacagtgttgtttctattctaggttagattcatctgttcagaactttccagagatagaattttacagaatgtggcttgcaggtgaaggcttgctctactgagcatgatgtctgcaagggccatccatgttgaaagaattccattgcctataccagtagctggagccttctactcttggggagtacggcagtctttcctcagtatctctataatcacctgacttcttggcgctacaaaaaatgtaaggaaggaaggtggtatttgagtatgttcgcacagtaggtttacatgtgtgaacacatagacctcagctggtggtgctgtttgggaaaacttggaaccttgaggaggtggagcctcactggaaaaaatggtcactggggaaggaacttgtcttcttatagtctggtctcacctgctttctgagtgcaggtacaacgtgaccacagcccatgctcttggcaccatgcctgccctgactctgccatgtcttctccctcacaaactattccctctggagctctaatccagaatatgactgttcacccttaaattgctcttgtcagtgtattttttatcacagtaataggataagaaaccaagacaagagggaatactttgcctccatctttgtgggaaggtaatggaggcaagaccctgaggcagctgtttacactgtatcttcactgaggaagctgagaagtgtgagggttgatgcttcctttaaaaaaaaaaaaggaatgatgccatctacattcagaatgagttgtctcattccaattaacatattctagaaaatccctcatagacatgcccagaggtttgtttccatggtgactgtaaatcccatagacttgaaaaacaagattcactatcacagtatccaaggggcattggttccaggaccctctggaggcatcaaagtctgcagatgttccagtttcactataaatgtctgtagcatttatatatcacccatgcaaaccctgtatcctttaaatcatctctggataactgacagtacccagtgtgtgctattctgtgaagttttcccattgtattgctttgggggaaatgacaagaagagaaagtctgtgagtgtccagtacacaacaattatttttttctggatgttttcatctacagctgaatccttccttgcaaagcctgtggctatgcaaggcaggctgtgtctccttacatggatgtatgcaccatcttgtcttgataagctcttgggtttctgccagtttttgcccattgggactaatgtatctgctctgtgttttgcaaatgaggaaagtgatgctcaaggagttgaagtgactcattgaaggtcacacaacagtgaggggcagaaccaaagtttaaattcagtcagatttgctgatgccagagtccataaaggactttttttagtgctctgtgatgccttcgcctatccctggtatgggtggcttgggaaggaacgaacaggttttcttgtcttcttctgactacttttcatggcagttggaaagcccgtgggcagctgtagggttttgctgttcactaatgagatgcttctgcctctgcttcctgaactttaaaatggagcaataataataagatcctttaacattgttttctttagtttttgaaattataatttaaatacatcatcctcccttcgtcccttcctccctcccttcagaccttctcgtaaaactacctgtgttccttttcaaattcatggcctcttgttttcatcagttgttatttagggatatataatattcccaaatataagtacaatctagcaggacccttttctaggattgattaattcctgtgacagtgctgggcatatggtaagtacattcacatgtgtatctttactagttgacagttatctattgagtattatctctaggctggatccatgtgctgggtataaaaggttgagtgagaaccctagtcagcacctcataccgcctggatggtccagttgttttctagccacaggtgaggatagtttgcctctctaccttctccttaggaaggcactcatctcccaaggagtcttcctggcactcatgcatgggcaacctgaataagccaggatgacttttgaccatcagggacagcagctgatggtgctagatgtcactagagaagaggatgttgaaattctcacttttcctaaacatctgagaattcagcagacacgagtccccagggtcccagcagcgacgaccatatgtcaagatgaaatccgaatgctgcctcctccctcgtgttctgctggctcttccaaaaccccactcattcctacttcttggctacaccctgttgcaggctctgttggtcagtgagaagtaaggcttggaaactcatactggcaccaggctactggaggacataatgaaaaactcaggactgcatagccagagctggcatctgagagctgggtctactgaggggtctgggaacgtcttaacacaacaggtcaacagtgtggtcccatgagtatgttctgtgaggcacaaggtttgtctcacctgactccccattccttacccgccagccatggtggatgcccagcagctggcaggcaagcattcttctgctgtagattctgattatggacttctaagaaccaagagttccttgtgaggccttgctacactcagtgacacttcttccctctggactagaaactgctggaaggcagtggcaggtttgatttacatcatgtttggactcaggctgtccatcttatgcaaataaatgcatgaccatctgtgtctgggaatgccctataaatagcaaatatttgtgtaaattgttctggagggatttgtgggaccattgagaattcacaccaggttgtattctccggaaagggtatatacctgctcttcattgattggaaaatcttcacccaggaatccaaggcatgctgagcctgcatgacttaaaccccacgtgactgagccactctgttgctcttccgacagacatgagaactgggggccattgggtgttgggtgtgggaaaacacagcaaactgttacaaaagaggggtatggaaacatggcctgagtttcctgtctgtcctgcaaagacaggcataagggtgtggggctggtttccatatttatctccaggcagctctcccttttgcctcttttgttatcagctagagagaagggctcagagagatgtgtgcattctaccctcctctactcagacctgcagcggggcaggctttgtgttctctcgtgtgttcatcacgttttcctcaccatgacaagatatcaactacaatgaagaaagttttgtttcagtgcatcgtttcagagcttgtctcttggccctgctgtttggcctgagatgatgctgtacatcatggtggcagcatgtgacagaggaggatatccccttcatgacatccggcaaagacagagaggaagaaaatagaattttccaatatttcccctaagggcatattcccaatgacctcacttcctcccactggactcttcctttccaaaagttctgccaccttctctagtagtgccatgatccagtgacaaagcctttaacacacaggccttgggggacattgagaacccatactctaagctgtctgacgctatctaacgtccagaggcacatttaattcagcagtatcaggggccagtgacagtaggagtgactggcacagactgttatctgattgttctagaagtacttttgaactgtggtaacatttatttaattaagcttaccatcgctgccatttttcatctcatagtctggtggcgtcaaatgcctcaccgccatctcaccgccatctgactctagcccgcttttcatcttgcggaacccaaaccgccacattgaaccctaactctccatctcccttatctgcatccctgggaactgccgcctgtgtgttttgaccactccaggcctctgggtccctcgcacagtgctcgcctttctctcctatgcttgtttcacttagctcaatgcctttcaggtttaactataccgtaacaggcaccagactcatcttcctttccacggctagataatattccgtagcgtgtacaccttgctacccatccacggataagtacctggcggctttattttggagctgttgtgagttgtgcagctgtgaagacagttgtgcaaatatctcttcaaggttcagttcctctggacttgtgcggatcctatgccgttagtctttgaggaaccacggtcctgttttctatcacagccgcgtcattttaggcagatacaagaaggccactttgtgatgcctgaaggggaaagtgaagactgaacagatgtatcccagcaaaggagaagagaggccagagggtcccagcctgagggagaacacgtgtaatgtctggggaatcccagggaggggacatttgaagacccaagagtagtgaagcttgggtgaggtgtgggatatggggggggggggaggaagagcctggcctggttgggagaggtgctgctgtgtggaggagatgggtcatatttctttaagggtgaagtgaccaaggccctgaggtgagtgtgctgccttggcagtctgttaatctgtttctgtactctactaggaggtttcactcttgaggaagcaaccagggcaagctgagcaggcagcctgagctctcagttgtgagctagtgggcacttgtctagtcttactggttgtcggcactggcccatctcttacccagtcagtctgtttgcaaggattcctcagccagaggcttctgaggccagttagatcttgacatcaatgctgtggccttggaccacagaaggacatggtgtggacacttcaccctcctcacctcatgtctgcatcctggtgaagctaggatgggggactgggtttgctgtgtcaatgtgtgacattttctctaagtctacctctcacgttttgcatggtctctctcactcagctcccagacctcacagactgatccagcaacatggagacctcccatagctcagaaaccttctttatttccttgtgtggtgtcatctcctggggtctagactcggtcctctgcagatactaaatgaagagatagtagagaattccaaagccagaggggactttgggagtcttctgttcatgtcttaccatacagatggggaaactgaggctcagagcctgtgtggtagccatcttcacaactctccttcagaagcacttggccccactggcctgaggtcatggagagggaaaatcagtagtgacaggcaggctggactctatgtgaccttcacaggacaccctctggagagggtagctgctctttccagcagccatcagcattcggagaagcagctctgcctcgctgaagaggcaaggaaagggcaaggggcttggcagggaaccaagctccctgcccatcgagcatattggggcttttctggaggtccaatgggagttggagggaagggtgaccagaatacagagcaggtgtgcagagtgagggagggagagctggagtgtacacacctgtccactgtgccagcatcaggctgttggtgagcctggtgggatgggatgggtttgcttctgccaccccactgtctatgccatgtggttacctcccctcagtctctcctcctcctcttcctcctcttcctcctctttcttctcctcctccccttcctcctccacacttctcccctcccccagttctcttgctcttccccaagctgaacctccaggggacattgaattggcactgttgacagtggcctttccgaaggagagccccgcagaaatggctggcttcctcttcttgggcctctgctcccatctttgcctacaggagatatttcaggtattctgtggagactgagaaagaaacagaaccggaaggcatctatctttccacagtctctccatgaggcttggggagggtgagcttagatcttggtgagggggcggggtgaagggtttattttaagaaaaagcatgcaaaatgataagtacaaagttaatacaaaagttaatatttatacagaatgtgaaatcataacaaattacacatttcaacacgctaacaacccagtcgttaagaccccagcaaaaccgacaacactgtttataaattattatggattattggctgccactcatccgtaatactttcatcctacaagctctgggtgtatgctttttgatgtcttcataggatgataattccctgccatcatttaccacagacagaattaaaagataactccgtctttctggtacacacggtgagctcattggtaacatgaaaatgtgcttctcccagcttccctgtttggttttggtaatgctgtaactgcaccatcttgtattcaatctcctaggcagacagggtcttgtagggagccgttcctgcattctccattacaataatggtgcctgaagacaccaaatgtaaattacttcacaggtgctgggtaatttccattcctttgatctctgcctatcccgtggctcatttggcctgaggagctgaagccattcatagggtaacaccacgtcccaggcggctgcttgccagcctttattaagggatgggtttcttggttcagggtctccgctttggtaagcttatgctctcccaactctcaagatgcattaaagcttgtctgcagaaggatccgagtgtcctgcgtgtatttcttgccggcgagaacatacagcgcgcgggacagggtctcccttggagtggctcatagtccagccccaagcaattgccttggcttagtcataggtagtcctggtgttcacctctgcctacttctggttctagggtaaagaacagtgtaaccatgtggcctaggtcatcctggcctctgactgtgtgtagagtctccgtgggtgagcccaaccatggaggagcgacacaacttcagtggtaggatcctgcagagtagtgtttgacttcagctgtggcggtgcaccgtccctactggattgctgtggccttctgaccatgctacaagcagaacacataacaacacagaggggcctgggctgagtgtgaggctgtgggctgtgggctgtggcctctcgaggtctcagaggcccctcttatccctgactgctgtttcccagactgtccctgagatggccgtggtagagagggtcctgtggtatctccttagttcgagctgctgtgatggggtgccattgcctgggctgattacagatgccaactatttgttttcttctggaaccctcagaccagggcaccagcaccagagcttctggtgggggttcttttctgggttgcaaacagatgacttcctgttgtgttctcacacaatagagtgtaaaagaattctccaggctccactcattcatgcgtttccacccttatgctctaactgcctcttcctggcccatgtcatactgaggattaaatgtcccgacagctaatcctcactgtcaacttgatggggttgagaatcaccatggaaacataactctgggtatatctatgagggtgtttccagagaggtctcactgagtgtgggagacccactgtggacgtgggtggtgccacactgtggggtagggtcctataccgaatcaaaaggagaaaataagccgagtgctaaaactcctttctgttacctgactatgggcttagtgtgacccgccaccgcatgctcctgccactatacctgctctctcatcatgagccacactaaaccttcccctcggggtattctgccatggtaataggaaaataacaaacacatgtgtcaatataagttctgacacacacacacacacacacacacacacacacacacacacacacacacacaatcatctatgggaaatcccacataaccattaaaacagaatgcgctgagaagtcttgatttcatacaggagctgaaaactggcctcctggtcccctcctgaagtctaacccaggagtcttctttcaacctgaacttaaagagaccactgcacagagacagagaaaagttaggtgggagatgtccaagacccacaggaagacctctcggcaggagaccccgggctggcttcttcacctggaagtcggctctgtctgaattgtctttccagtagtgttatattcagtaagggttagagccagctgtgcatatacttgacccaggcttgggttgggcttggtgacaggtgacaaggttgctgtgtccacactgggtgagtgggaagaccgagtgggagggtcaaaagcaccattgggttcagagggtcagagaaggcttctgaagtcacatccagaaagccaaattgttccagactcaaggcagttagacagcctgtggttgtccaggaaactgtagataaaatgggctgatggctggctctgccaacaaggaaactgcaggtgcacacgacatgtgaaccttgtggcttctgaggcaaaaaacttcaaaatatttctgtgtggataattctatgtgcattaactcatgaaaagccaatttgagaagacaggagaaatagtcaatgtgacagacacagaccgacactgtatgtcactgtgatgtcaaccgcttagtgtctctgaaaagtattattcaccttgaccttccttaagaatgacagtggctactttctaacacatgggtgtgatccacactgcatcaggcatctggtatttgctcatcttattcaacctgcacaacaaacctgctatatggagagaactgatctctccattttgtgtctgaatatgtggaggttcagagagattgagcaacaaataaaaacccacataagctacttactgatggtggaactgggatgcaaatctgagtttggttattcaaaaaaaaaaagcctattccttttcagttgactagagttgattgttagagagcattctggagcaagaacagctcatatggcctcacaccacaggggagggcaggagcaatggagccactgggatgtgtgtgaatgcctgggaatctaggactaagagccaatctttcagctgtaggagttcccggtagaatttttggggtcactcctgtataccagcatcttgtcggcaaatagcaaagtttgacttcttcctttccaatttgtatttccttgatctccttttgttgtcttatgctgtagctagaactttgagtactatattaaatagatatggagcgagtggacagccttgtcttgttcctgactttagtggaattgctttgcgtttcttttctccatttaattcgatgttggctgtcagcttgctgtatattgcttttattatgtttagatatgttccttgtatccctgatctctccaagacttttatcatgaaggggtgctggattttgtcaaaggctttccctgaatctctgagatgaatcctacttgatcatggtggatgatttttttatgtgttcttggattcagtttgccagtattttattgagtatttttgcatcaatgtttatgaaggagtttggtctgtaagtctctttttcagttgagtctttgtgtggtttgggtatcagggaaactgtagcctcataaaaagtttggcagtgttctttctgtttctattgtgtggaacaatttgaggagtataggtattagctcttctttgaagttctggtagaattctacactgagaccatccagccctgggcttttgttggttgggagacttttgatgactgcttctttttccttagggcttatagatctatttaaattgtttatctggtcttgatttaattttggtatgtggtgcttgaactggctttttgagcccattctctttggagggataccttgctcagcctagatatgggaagagggccttggtcctgcctcaaagtgatgtgccagacttcgccgactccccacgggaagcctaaccctctctgaggagtggatgggggattgggtgggggtaggtagggaaagcaggaggaggggagggagtgggaattaggttggtatgtaaaatgagaacatattgtttttttttttaaaacagattcttaccaaaaaaagccaatctttcaaccatccaaaacttgtggtaccatgcagtcagataagaaccacttgcatcctgtccgaccacttgcaacctaacctctaactgaatctggcatctaccacatagctgtgcctgtgactttgtcacataggtgaactataaatgctttcacattacagggtagttttatagataggacattctgttcatggcttgtcaccaccttgcagttacggtggctagctcacagaagaccctgtcatttaatattactcaaagcaagcacaatcatgctatatattaactgttgaaatcattgtcataatagggctccaacaacgttcattgacttttttgtgctgtatgcatttaagaatactatctgaggaagactgtcaaagggctccaaatacaaaatcttccagatacctgactcaggacatgggttacagaaccaggtccagctgaaatcacttcagctataggatgtggagtacatatcaacaacacatggggatgcagacttggtggtactggcatatgggttgactgtatctttgttggcatgcaatagtcactgtcctgggctcaaggatgcacagcagtgttcttgctgcctaccctcaagatagtaccccatttttagctgtaacaaccccatatgtcttctctgccctttgctacatatccgtgtaccctggagagggcgcaagaaggctccagcagagaagcgctgtgctgaatacacagtatggcactagagggcttttttttttagaagcaaactgtggcaatgtaccaatgcttggatatgcaacgaaggcagaaactcccttttctcttaggggaccaggtttcagcaggttcaagatcaagagggactggtctgagacagaaactacaaaacttcctccccacagtgttaacagtctccatgatggcaattttgacagggagtcctgggctcctggccttgctgaattcacattaggatggggatgtgaagacccaaggaaaccatctgacctggaaggtgggagatcagggccctaaacccgggatgggcatgagctatgcggatggctaacccagcctaggaggacctttgatttccctaaaagtcagaagatcaaggacattggggacacactgttgctctgaaagctgaggcaggggaccagaagaaaggagggtatttcttgattctttaagtacaaaggggaaatatggtccatgtgccacataatgagatattagtcaaggctggatggcatagcccacagggtttccaaaaagattatgatggagccaaagggatccttcctatcgtctagtgacatggtggctgctgcaatgtccttgtgccatacaccacccgtgctgatggtgacgctgatgtcaacaaagctgttgaacagcctattgtgtgaaagcattccacgaagagctgtgcatcttacactacacttgacaatgctaatgagcagctgtgtttatgtattgctgcactgcagctttattgttactgcggagcatagtccctccacttagtgtgaaacagtctgtcatattttaaccaacagcttcgtacgtctgctgcctacccccccaccccaccacaaccttgtgtttcgagacgatgcctcttgtagctcaggctggcctcaaactctcactatgtggctgaggatcaccttgaacttctggtcctcctgcctccacctccccagtcttaggattacaggtgtgtactgacatgctttgtgtgtgtgtgtgtgtgtgtgtgtgtgtgatgctagggacagaacccagggatccatgtattttagccccattaactgagccacagacccagctctgatggaatcatgtctaccttgacctagatctaggtttgtataagggcactctggtgttggcgcaaagactttatctggaagggatacaaggttattaacagggctgagagcagctctggtttctgagtgtttgcgtgacaccaggaatgatctaagtagtctgtatcaccatgtttaatcctttcggcaaactcagggaggtgccgttactgtccttgcttcacaggacaaagataagaggcttagatgtcagttatcatgcctgactgtgtgagtgaccgtgcccatagggcttgaacccagggacgattcaaacctatgggtttaactaaagggcagccccacccaagtgcccatcccaggtgccccagtccccagtggcaacagcactaaatggctgttaggagcccacaaggaacttgcacgctcatctgagccggtgtttgaaggaagtgaaggaggcagacctgtgaccagtgggcttgagaattcagtgctggcactagctgtgtcctggaacagtgattaaccattgtcatgcgccccaagatgccgaagtggctgatggaaagcaccttaagaggacacaaacacgtgaaagaggtgagtgaggacacagaaggagctacagcaggcagcctcgtttctcctgacgccagtgctttgctgatgcttgagggtgagtttgtaggggagcctgcggatggctttccacaggccattcgtccacatttcccgtgatattcacacacaagtgcaggtgtggtacttaagctgagtgctatcaggtcaggttgtctttagtggattgaaaactaggcctcaaagggcctaatgagctatgatgggctcagaggaagtgttggtaaaaactggagatgactcaccaagcagagtatgtccctgtgagtagtcagagagcaaaacaagtgccatccagcaagtggatgctagcaatgtctgagaaattggggaggcgagctatgttacaatcttgtctgattataatcataataaagatgtagccaacagtcttaaacacaatctggcaccaaatgtcttctgatcatgttatatcaatcagctaattgagctcctcccagtggctaaatgaaataggtcctatttctttccatatttcacagttgaggacacattgagttacatccctgtgacagtgtgatggccagcacataggcacggtggagagtctcaaccagttctaagcatgagaagaggggctaatgtagctacgagtgggggtgaactcctgcaatcctagcataagaaacaaaggaagtattatgagttcaaaggtcagcgtgggttgtgcagtgaggccccgtttcaaaggggaagatgaccaagtgcacccccaaaagatgatgatcactgtgtccagtggatcagctgctccttctctgggcagctttccctgctccagggtggggtagtggcctcgccagtgttctcacaaggcacacggtacttagctcagtccctgcttcgtcttgtccatgtctgcgtctctcctgggctcgtcacatccattctgaacctccaggtatcaaacacagtgacaggacatgcatgggcattgcaggaatgttggcaagaggatcctgagggatttagggaagtctaacttatgaagggaagagacggcctgaggctatggagagaagggctaacaaaggaaaatggggtatgcatggagaaaacgcaaccaaagaccaaatgagagggaaagacaagaaacaggcataagaaagagaagttgttgtggggaacttgtacactgtgaagatgcattgctgtgaccggtgtggacttcagggcagagagagatccctgggaagaaggcagagtcgccagccagataaggaggaagcggcatgagcagtaaggagagatgaggtaacgagtcacgtgacagaacatagattaaaataaatgtgttaattgaagttataagttctagtgggacaaacctaagctaaggctgagctttataattaataagaggtctatgtgtcattatttgggagctggtggcccaaagaaaaatccaactacaataggtggctgccagtgggggtggggggggaggtgacaataggctgaggtgacaatacaggaggcttgggacagtgaaatgatcgtgtcatgaccccggtggacacatgccaatacacatgtgtgaaaacctgtagaaggcagaacacgaagagccatcaccaatgtaagctacagttcggtcagcactgtatttaatatgagctgatcaactaaataacaactgcattccactaacgcaggtgttaataagggaatccaggactaaggggctctactctttgaacaattttaaaaaatacatctaacactgttcttaaaaaataagtctataaaatagttgagcctggggatacaggtttataatctcagtgactctagaggctgaggctggaggattccaagttcagagcctgcctggactacagaatgagttcaaggttagctaagagtgctagagattcagcttagtggggagttctcgtttactgtgtgtgaggctttgaatagattcagctgcctgcacaccacacacacacacacacacacacacacacacacacacacacacacacacacacacgaaagaaggggtgcaggggtagaggccttggacacacctacagcatgaggaggaagcctgcatcaggcgtggcactcctgcacaagcgtggctttcctatgcactgagacaggcaggaaaaacaggtttcgaaagagatgaacacactccctggggccagaaatgccacatgattataaagaatctgtggcttcatcaggtccaaggtttctttgggatttcagttgttccaagtccttacactagaatggactccacggtctcactgtagcacctgggcctctggccaaggccgactgcaaggggctctacagaaatgccatgggaggccagaacctcacaggctgttagtctttgactcccacccttgcccaaaatgagggcacctgttcttagagagtaaaccctttttgtggccgtgtgtgtgtgtgtgtgtgtgtgtgtgtgtgtgtgtgtgtgtgtgtgtgtgtcactgggatgggccactcctgagctgcatgtgctccagggaggaggtaaactgagtcattccgatgtgggggtgggccaggcttgagaactaacaggagtgagcagttgctgaaagagactagagaacagacaaagctgggcaatggattcttgactaaaaacaaaacaaagcaaacgaacaacaaaatccaccaagaagattgccactgtgttggagctgaaagagatctttaaggcatgcttaattctcactgaagagtgaggaacttggggcttagaggcatcctccctaccctgattctgagatccatgctctactaaatcacatttgccttcaaagtagctctcagcccagctcacattgctccatcacaccctgggagtgtcctgatttcaaacttttcaatggtttccctctcctgtgagacagtctgctaagccccttagcacagacccaagccctcacggaggctctcaccaaaagcagatgtcttcagcttctagattgtacctgcctatctgcccactgaactagggaacacaggtaaggtgcacattgtaggtcgataaagacttctccctgcctccagacagatgtcagtctgttcctttgggctccattgcatggcctttcctaaactccacctgctagatttcttccgccattggcctcaggggaacacgggccaggcctcctgggactaccagactcttgggatctgtgcatgaagctctcaggatgttccctactctctttccggtagtcagtctactctttgatcactcagaatgataaatggcaggcacccggagactggtttctcatagtgtagggtggcacactgcccaatatggcagttaaccacatgcacagtgacatacactctctacattaagttttatgacttcagggccaccatgctcagtgttcatccttacaagtgaccaacagtctctggggccctgtttagcttgctagaccagcttgtctttacctgcggatttcccctttgtcaccttggaaaatgtgtgggcattaacttttatgctttaaattgaaaatagacaataaaattaaggaagcaggttagtgataatctacagggctgcctgtggagatgagttagccctcagagtctgtgtgggggcggagggactctggggttctccagccctccgtgagcagagatgggctgggctgcaataagcacagaggcctgatgacccatgcactgaaacttcatttatacaaaagcttagtgtgctggggctgggctcctgggagtacaattccaggaacagacgtggcttatctcagtctctctgacttggatagcccctaataagcctcatctacaaacacactggagggcaaagggaccaaggctggtcaaaggtatgtgggactcatctatatgacagccactcccctactcacacgggacctacagctgccatgtctcaaatgccctctgtgtctgcttgatttagatcagttgtcgtccacagcctggcaatgaaagcaggggggaactattctgaatttctgcttgaagaaacaaaggcccagtgagctagcaactgatgcaagttcacagccaggtggtacccgaggaggcaggttctgaagcccaccctcccccatggtacgctgaggtagccgctagagcccgaggctgtctgagggggaggggattcgaatgcctgctgtgcagagggaggatggagtatgagaaaccaccggctccaatgggctgtggaccaggagtctttgcatttgataacttggacttgctggcggccagggaccatttctgtagtaacagaaggcagccttctccgtgtgccagttgctaagccgggtgtaattaggtgggaaagggcctgaagcacccacacaggcaaatcacaaccttgcaattaagaaaagctacacggcaatgaagtgtgaagatgcctgccacttgtgctgtgctcatgatggggacccagtcagccagaactggcctgctgtgcagcaacttggatgaagcactgaggtatcccgaggagagtcccagcgttggcctggctccctcttccacagccaggtttgtttcacacagaggaggtctgcggaaggtggcctgctccctcacaccacagggccttagggatatttaaaagaattgtgttgggaccacaccatgcttggaatctcacaaaggttctttctgtccgaagcaactagggtgggaaaataaagagcaaattgtgtgatggaaataactgatgggaatacaaagttgagcgatggccagcagggtccaggtgactggtttgggcattgtgtgatgttacagttgagtagcagtggccttcccaccggcctgtgtgggagcaatgctgacaaactccttgatgtctgctgctgtcttcctggggcctggtggcaactctgtcctgctgctggagcatttactggaaagagacagggatggcctcagacagctctgcacacctctccctgcctgcctcatgggagaagaaactcttatcgggaggtctctcagacacaacctacacgaagaggcataggagggaatgaagagccaaggtctggctccctgggagatagtgcctatggcgggcccggttccccgaggcatacaccgtcaaggcagtggcacttccccacacatcaactcctgtgaataaatggaatcgatagtgtgggactgggcttcaccagagacagcatgaggccaccatgcaagcaatcggcagttacccacagttgtaaccatgggctcagcacactgtcaccagggcgaagcctgcccttttcgtgtggtagctccttcagctgtgtgtccttcatcctatgttttatttcatcacctgggatcactgtcaggcccttcccaccctcccctctccactctaccattaaaggcacgcatcaggctgtcattttctttttaatttttaatcagtctgtgtcgagagaaaacaggactcgatcaagcttccagcccttgctgctctgccagcacagtgattttatggatgagagttttgtttatatttgtctgaaacccagaggaggaatggaagcgacgccacagaccaacatatatttgaagagacgcttctggactgggggttcttaggcacaacacccagtgggcgccatgaaaccctcacagtaggaacgcaggatggcgggcaggcaggaccaaaggccccctgaaagcaagagggcagggtggctcggggctgagaggccagcctgcagactctgcagcacaaagagagctggagggagcggggttaagagccgacttacactttcttcggatgcagaatgtgttttacagaaacttacgttttgtaaaataaaaggatggttacgttttagggtcagggacaatgtgataacaacgaccctcgaaggaaggcatgggcgagcagataaacacgagtggagtctttctgaaatacccaaaccaaacattaccaaatcactcagtccaccacaagatctgaacgtgtcctcaaccgtgggaaaagtcacaggtttatcccaggccacggagccactgccagaccacgaatacaaacaccgatgctcgtcaccagggggcagcacagagcatggggggctctgcatgaagacattttcagaaagcagagttggcttctttttcttccctttctcacccgaaccgccacatcctgctttggacagttgtcccggtgtagaagatggtctgagtattacatgagagtcttgccttgggagcccgtcccttactaatgagggcagagaaggatctgctcctgggctggccggttaacatgggctttctacagagacaggcctgtccagatctagtgtccctagacagttcacagcagattttagaagcggatttatacaatgtgacatgctttcagaggggcggggagtgctggtaacacaagccaacaggatatgtgaattgtcaggatgtgtgtgccactgtctcacactctgtcatgggggtgatgcagagagtcccctctgccctttgttccctgcaggtcatgacgggcccgcgagtcccactaggacgcacggcgactgttggtgtgcagacccgcagtcctgttggatatgtgtggtgtggtcactgtccccatgtagatagattagaaaatgccccagtttctcccaagctctgtcctgtggcctcactccaaagttcaaggctctttcccccaaaggggacagtggcattagcaggacttcacccaactagggatcttcttccattagagggatctctggaaaggaaaaggtggttatttgcttagtacaactaaaagctacacgatctggaattatgagtctcattaaaactgctcccatcccagaaatcagtgaagaaaggaaaatgttcagttccacgaatcctttaaaggtcaaataaaacagcatcccttctccctgccctgtatcctatctatttgccagagaccagtttgtgattttatatccagctcataaaaaggacaacattagactttcagcacaagctctcacagtcactcaagccaacaggttacaatttcaagcacagagaagcagggtggggcacagggagggtgctctgtgggctagcaggctcgttggtgtcctgcttctgctgtttactggggccacactctggaaccaatgtgattttacagagtggcgccaggcttccttcccctggagagtggagccccgatgactccgacacattttactgttttcatgggctataatcttccccaggcctgatgcagcttccacttcttttacactgggtaacgtgacttctatgcacacagcacttctctggggtcaggtgggcatgggggcccgacaggtgaggctggcagcactcctcacggcaccagcctcccaacgcctcccagtgtgcacggcagcataggagaaccagccttctttaagtcagttttgaaagatgtgctggggcctggtgcacacatctagattgttcctctgcctgtgtgcgattctcttcccgggcagcaccgtcagaagtcctattcaattaaaggacaagaagacaaaacccctgtcttacaggaggcatcaaagctgaagcactgtctactcttagcctttgaactcggtaccctctggggccacatggaatttctattcctgggattattactcacaaaattatgatcattctttaagacaattggcctgtcgacagacctacaagtagagagagtgagaagcgatgacagccgggtaaataagcaggcccacggccttgaccctgagccggggagctggccacagcttagcaaatacttaccatctgcaatgtcgatgcctgggctggaggatgccacctcctcggctgtgctcgcaattgtttcaggggtgtctggggcagggtggttgcccccttgacacatgggggctgaatatagactctggagcagctcagaagagcccgaggtgctatcacaggtttcggactccccagggcctgtgtccgtgtccccggagccggggtatgctggagggctctggtcatccacaggtaaaggacagccctggcccacggaggccaggtacccggggcctaaggcactggagcctccgctcacagcctcatcataggtcgggagcatgacgggcactccatccacgaccacgaagtcagggtcactgctggagctcctgggaggacccctgtgcagaggaagaggaggaacacgtcagggtctacaccactccaggaatgagacagtgtggagaaacagtctcttctctcaggtgttcctggcaccatggcctggtgctgcgggaggttttccttatagcactctccatcctacaggagggtgacactaagtgcccagagggcacaatcggtctgtgtttattaggcctcttctttgtaaaaacaaaacagaacaaaaggaacaaacaaaaccataccactcaactttagagagagagacaaaacacaacagaaaactaaaaaggtgggctattagttgcccctctgactgtgtcattccaacggcccagagagaacctgtacagttgctgtgagggatttacatggcagggaggccagcctgctataccctcgggtgctccctcccgggtggagcacacacacagcctggcatacccgagggtgctccctcccagctcctggtctggcccttgtttctgatgtcaggtgaacacgccgtggtgctgaacctgaccctaggagatgtgtgttaccaccaggttctgcccctggctccagaagggcccacagcggtgagtaaaacagtctagagcgtggctgcttatttcttctgctgggaactgaagttagaagaggaggccagaggatgacacagcagaaagtggaggtgatctgtttaggtgtgagtgcttctgggaggtgacatggaatgtctggacacggcatttatgggggaggggcggcatcagcccgtgctgcttattcacatgacagggacggctatttgaaacacctgcaatagctcggggattatggcattgccttcttgctccagtccttagaggctacccagagaaggcaagagaccacctaggcttgcactccctagaaggtgggaggaaggaaggaaggaagaaagaaagaaaggaaagaaggagggaggaagggagaaaggaaggaaggaaggcatgcagaaaggaaggaaggcaggcaggaaggaagaaagggatggagggagggagggagaaaggaaggcaggtagaaaggaaggcaggcaggcaggcaggcaggaaggcaggcaggaaggaaggcaggcaggaaggaaggaaggcaggcaggcaggaaggcaggcaggaaggaaggaaggaaggcaggaatgcaggcaggcaggaaggaaggcaggcaggcaggaaggcaattagcttggtgctgctcaccctcccagaacaaactgtgctcacccctctctggcctccatggtctcccatcagcctatctggctcactcaggacttcctccctgctccttgctttcctgttgtcagacccaagcaggctgatgcctctgctcatttcttaccctaacagcccatgctcgggccacagtcccctctgcacagatccagtcatgccatgtgactttcatatgtgttgacattaaacacctgggatctggaaaacacagtcgtctgtccttggcatgcccttgcataccttgtactccattttgacagatgacaacaacttgccctaaacaactaaaggaactaaactaaacaactaaaggaaaaccatcaagtcagtcttgagaaaatttcaaagacatcctagtagtccatatattagaaaactcttccaagcatccatccatccatccatccatccatccatccatccatccatccatccatccatccatctttctctatgggccatctgaaggtttgttcacacactgtaaaccacagtggtgtagtgtagctttttcttatgatcctttggccttcttgagaaagtgtaattgcttagtgatagaacatggtcccttgattaataagaaataatgttgaagacgcagagcagatggaaggtttgaggaggagaagaaaggaaggttctggaaccacagtgaaagcttagtgatgccaccagggaggtgctgatacaaccctgggcctgggaaggacataagtgacccctacacccagtacacgcagctggggagagtgaggcacttgctgagtgtgacctatggtgtttctgctgccaggttcaggagaactgctaagcaagatgaagctcttgggacgtgtgaggtttgggaaactgccactcctgttcctctccacactcctgggaggtgagagctatggggctgtattgaggggatagagttgattccaggagcctccttcttgcccaaagcatagtttttgttgttgttgttgtttgttttttcaggcatgaacttcaaatttcttgttctgataattaggcaccattgtgagggcaacttagggatgaggatgactgactgagaggtaaagaaagctgtgcgctgtcaaggttcagctgtaagggcagtcatggagtgaggaggacacaggcatgaggacactaacctcagtcctcaggtgcagccaaggaggagagagaaccaccatctgaagcccgggtcccatcctaggcccttcctggtttcccactcaggcctgctctcctttctgaagcttcctgccctattttgacctctgccatgtcacatacctgaccttgatgcctccccaggtctatgtaagtcgtcttctagggccacagtaggtggatcgtgatatgtgtgggggtgctcctgatggggcatgcacagcttgcattcctggcctggtcctctcctccagtcccccagagtgcctgctccagagtggcctgcccagggaggcagggatgaggcctatctccatcctggtgctgtctccctaacaatctacccagaccttcaagctctgtcttcatctgtgctctctctgctgcactgacctgggagggaagtgagccttgaacttggtctggaacattctggccaggatgactagcagtaacaccaacagcacgctggtggctgtgaatgccacgatcttccatgtggtcaggagggtctcatgggtgccaggccacgtttgctctgccatgagagataacaaagccaggcatgaggtaccatgttcctttggtgggtggtcacctagtacatgaggtagccgtggtatgcctcctgggactcaatagacatatcatacatgcagtacatatgtaaatcatgttaggacccacacaacacaaaaacctatctctagcatgggtcctgctgggttgaagacatcatttaccaggagcccgtggagcttgcatacagtctccacttgcgtgagatcagttcttatccacagaaacatcattcctatttggatgagtgtccctcaatggaagagaagggtggggtcatccactgctcagatccctgaaccatgcacataattctgattacgcccatgggcctgcagccttacctgtggacagcaccaaggctgtgagaaactgcagaagttgaattcttccctgggtgccagggctctgattcagttcataaatattcctgaccttctgaaaaaggctgggaatcccttggcagagtccaacacagccacccatctccataatggttcattttctacagcctggtcctgaggctcaccataaggcaaggtgtcattcaggacgcagcctggccaaggcttgaagactgctctcagaggaccagcctcccccaagggtgtagcctctagtctcacctgatttgatgcagtagacttggtaggaaggaaaccactctccatactggcaggtgatgtatttgtagtcactggtgaggctgtagccaggattacagtagaactctaccacggtcccgtggttgtagcgctcacaaggcctcgggtggcagatgaaatctccgtgactcaccatgggaggtagcggacagacttgggcagttgggggaaataaaagtttcagaaccaacgggttcctgggaggggcccttcagacatgatacaggtacggccaacagactaaggtttggggccagacagtggaaggaagcctgctatgatattctgagcacgcatgttgtcatgtggtgttgtaaagtacatcgtaaagagaggctcctcgtacgatgtgaagagtgtgcctatttaacagatagtattaagctactctattaataatgcatgctattatgtgccagacaacctagtaaataaaattaagatatttatgggcaaaatctttacccaatggcacagtgctgccaagtctccttctgttacccaagcagtcatctggaacggttcaaatggaggagccatggcctcgcctgaccccctcacagcctgcagggttcagccaagggcaggcatgatgggactctcctacttctatttgtagtcttagccttggcccctcacaaacaggtgctaccagggccccaggctttcttccgtcaacacagcatgggaccttagatgcgtccctttaccctctaagtcctggtcttcttctctgtcaagtggaagcttgttctgtttgatgatatttaagggttttctgacccatgctgtatgatgttgggggaagaaggttgttttcggcctcccacctttgagatcacatctgggctatatttctgacactggacagacggtattagaggagctgacaaattcatcgcatgccacaaagagctctctgtctgcaggacttggaactaaacagcatgccacttaaacactcctaaggagacaatcagaccacattctaccaatgcttgcctttcagatcacacctcagaaggctgaaaaccaggacagacaaacgcaaaagtgagtcaacttttggggcccttcctgggaatagccaagtactctggctagtgtagaaccccctggcaccctgcaccacacctcaaactggccaaagctttcagagagcatgtggtgtgtgttatttgagctggataaaaagatgggccttgtagggagagaccctgattacatgtactgctgaccacgcccaaacatgtgtggtcacaggtacatagaagagtgtagataagggcaagggagagccaggggctctctctcagggttaagccagcattgggaagcgttctgggaccagaccgctcagagtgccagtctggttactgattcctcgtgtgagtataaatccccaatagattactagttaataacctatctcagattccactcgtgttcatctatagggccccctgatggaggtgttccaagatgtgccttatctctaaccctgcaaacaatgccgcaatgtagatcctactgactcttttaaagatgaggagacaagctaagagaagcagcgagcggagagggaacagaggctcgctgtagacacaggtacggaactgaactctggcggaactactcagcagccagtggcccccagcaatcccttctcatctcagtgccctcatggagcaagaggtatctgagggctgtccttagggatgctgccaaggcctcagttcacagccagcctctaatagtgggtccatggggttggctaggacctgagcattaaaggaactcaatgaggaggtagaaaaatggcaaagacaactgggaagttacaagattagcaagagcagggcactgcagctcccggctggttgggagaaggggttgctggggtccccgtagaaagtagaatggtggaggtttgtcttggagaagctggagcaaaggaagccactccagggcagagagtgaaggggacacttgaggcagcttccagcagggagtctaaaaggtgaggtctgtagcaggtagcccggctggagcacgtacccagggatggagccgaggctgggggtgtgcacagctaaatggtgtcggatgagaggggcctccaggtaggcccaggaaacactgaagtttgacttctgactttagcactgagcttcctgctgtctggggctgttccctgggctggcaatgcacccctgcactgctcacaccatggcacaataaccccatgcacttctgtttctgtctctgcaaagggctctctgtccaggctagctactcacagggtgcttaggaggtaagcaagacggccagcaaggatggctggtgaccaggaaggacagagtaaaggcacccgcaatcttcatacctctgaggactccaaggatgcaatagtataggctcctcctttacttagccctcttttgtgtaactgtgcccccactggttcctggaagggtgaggggaagggtaccccagtggcctccagggctgacaggaccaactgtctgctggggcttcctaaaccctgcacctctgtgagtgctttacgtgagtggagacccttcctgtgagtaaaggtatatgaagtgtctgtctaccagctgatgaacagacaaaggaaatgtgatgtatcctatggaacatgactcagattttaaaaagtgaactctgccattttcaaaaacacagatgaacaccaagggtattatgctaaatgaaatataccataggcagaaattctgcatgatggtgaactcaccagtatatatagtggaatatatatatatatatataaaatcatatatatatacacatatatatgtatacacacacacacacacacacacacacacacacacacacataatcaaattcacagaaactgactagacagtggttatcaggagccaggggttagggaatcagaaagtcatgggtcaaagggcacaaacttgttaggtagggtaaacaagacttgtgatctgcacagtccaggagctatagttagaagtactaagctgtgtccttaaactttgccaaaagcaaatttgagctctcccctcaaatgagacgacagctgtggggagatggggtgcccatggctcagctttagcaatgtctcactatgtgggtatgggtcaaggtaccacattacacacccagatgtatgaaactgctggaaaaaggaagcaacactgtgcactaaggtgctcctacccactaggctttctgaacaaatccccaaaggccaccctagggttggcaaatcaccagcccgggcctcaagggctgtaacacctcacaaaagaagccctacactaacatgtctaagtggctatgacaggatgttcccgcacttggcctgagggatgaatgactgttgaagtcccaggcaaacagactcacaatgtgcttaagaatggcttcccccacaattagtcagtgtgggaaagttgtccacatcgatgttcaaaccctggctctgctactgaagaggcccctgtgcttcggggcagtgggcgtctagcataacttcttcctgagaagaatcactgatgcccagggttgtcagggtgacgagaagcgctgcaagacacactgcccagtaggttctgaataaatgatggtaattagcacagactcactggagttctgctgcacccactcccaggacgggcactgcccaggctccatgcctggctgcttgcacagtgaggtctcccaagcagagcagcaccaaacattcagagggcctggagcctctggtcaccatgcttcttcagagaccaggtaaacactaatggttgcagagggttgtgttctctcatgatcagtatcccatggagacgtgtgtcccccaaatgggagcatttatccgcacaccttgctatgttctactgactgcacctggaaacaccattagctgcaaaggaaaccttcatggggggtagtttggggtgcacggtgtttcttctggcttggaaggaagcattaaagtattgttaattataaacttgctgggctgggggatggcttagctagtaaagggcttgccgtgcaagcctgaaaacttggatttggtcccctgaaccacaaaaaaaaaaaaaaaaaaaaaaaagaaggaggaagaagaaggaagaagaggaggagaagacaaagatccaccaaacacctccccgccccagggtttcagtgatgtttcttgatagtgtacagtcaattctccctccttgcctaaaggaaccatgggtttcctgccagaagtggaagcagcaatggactggtctcagttacgcttggtcacaagttctctcctgggaccactgggaggcagtggagagagcccagctgtgctagggacactgaggatctgcttaaatcagctgttcagggagaaacagctctgttcctggtggggtctcagatccagatcccagacagcagctgtttgttaagtgtccacaacaaaatgaatagaaaaaaaaattgatttgactttgttgcagcatccatgggttgtttcaacgtgtctttatttaaatgtaacctaactacagttaaaactaacaattaaagatgggggcctatgtgacagcttcctctctccattttctttcaagaatccatgtcactacagattatgtcagcatgggtctgcagcacactggaaaacaatcagtaaaacacacgattcacgatggagacgaatgccggtctcatcacagacacatctgtattcgctacttgtctactgctgtgatagaacaccatgactgaggcgactcacagaaggaagggtttatcgaagcttctggtttcagagggtaagagtctatattggtggggaggctgtagcaagtggtaagcgtggcagctggagcagggaactgggagctcatctcctcagtggcaaatacaaggtagagcagagccaaactataaacagcaaagccttcccacagtgacatacatcatggctcatatccctaacctccccaaacagcgccaccaactggagaccaagtgtgcagatacctgagcctatgcaggacattctcattcaaaccaccacagtgtccactgctttatggggcagaaaggccaggaagagctcagccgagggagtactgaggcggggaatgcagaggggagtcacagtcactgaagaggagcgagagggaggctgcacagcaaccagtcaaggagacagttgggacagtgcagatgaggtccatatccccatgtttagaagttgggattttgtcagaaatgtgatggaacgctgtgaagagcaaggcttggcagagctgtaaaagccaggtccggcttctgtgtgtgtggctggcagctggagtataacccagacctgcagagttattaggacatggttgtcatgatctgaacagatgatggcagccaggagcaagtcagtgatggccagcatgctgggaaggagagtggtggaatgccctctgaacactctagttctttttctacaataggtttttgatagctggatttgggggcccctgggagaggagctaaagacaatggccagattttggatcggagttgactgtgatgccattcaccacattaggtagctgccttgtggggaggagtggtactgagttcagctttcttcttaggttggagctgccacagagtgtcagtcaggcatctggagaaagatccaggagatagctcagcagtcatgagcagagagacggtatttctgaccatgggactgcatgaactcacgtaggaaaatgtagagaaagggccctaagaccaaagacatcaggaaagacaaagagacaggcagagtgtgctcagttgtttcacagacgccgagagggagtgttaggaggaagagtgagcgctccctagtgaacagggaaccataggaagagaagctgccatgggtctggctacatggaaatcaccggtgaccttgaggcttggtggtggaatcgaatccatctgcagacagcagtgactgggtgtgaggggaagtctactgcagggaggccgcggatggggtggccggatggtcaaagaggaccccaccagagtgactggtgatacaggtagaggggctgaagggggcagccatgaagaagaggagagggggtgggtaccacacgagcagggaggttgatttggagaaggagctggatctgggcaccagcctgagtagctccgaggcagtagacagacaggcagactattctctaaagacagctattttctgactaaactatggggaggtcattatttagcagctgagaatataattccttagtcaacttatatatttcaatccatgcaaaagagggaaatgaacctcatgaatattcacacaaacagaaagtgcagaacgttataacctatgttctccaatgctttaaaattcttccaagtcgtgagccccattgctttcactgatcatttcattctcacgtcttccataggctcacacagtccacggatgttgtccacgtagggaagggctgaccctgagattatgcatccacctttacctcacacggttagtggcagaggctgtccttttatttctgagtgtcccctgtgtctgtcaatgaactgtgactagacagaacacacagcaactgatagcatggggccaggctagagccatgagtctcttccttattagctagaatggaaatgatttcccaaagggatctgaagacagcagagtccaggacacctggtgatgagacaatgtactaactgaccaacactcgaaccacactgtatcatgaacatgaattttgttttgtttgcactacagaccgccccttgggaacttccacatagtcctggtgtaccttacacttggcataaggagtaaggaatgggcaggagactgctcggtgaatcagcacagtgggcactctgatgagttcactgcgatgaccacagctggcatgcaccctgctaccataactgatttatttttattttgtggacaccagtgtttgtctgcatgtgtgtctgtgtgatggtgtccaattccttgcaactagagttatagacagttgtgagctgccatgtgggtgctgggaattgaaccagggtcctctggaagagcagccagtgttcataacagctgaactatctctccagccccttgaacagtatcttaatgcttcaagtcggtggctcctcagccccaactgcatactaaaatcactctgcctaatttgtcagggctgagttgtggacttggctagctcttaagagcatgtctggtaattctaatgggcaatcaaagttcagatgccctgctctgtgcagttgtgatagacagctgaggaaaaccaactccttgcactcaccaacttctggatgcaggctcagcacacatgcatgctctagaacttgtgtgacctatactgccatggtatctggcctggtcacctttcaccaaattctttctactagaactagagtccacgggtcaccagcattggatgagctaggagcacattagaagtgtaggctccagccaccccctaatccgcttaatcagaagctctgtgttagagaaatgccctggtgaggtgagttactcacaatgaagttagggagctaaggataaaccagagaggagaagcaaagaaggtggcacttaatgccataatctggccttgaagagcaaggcatggtgggaggagatccatgattctgtgtgttgacatcacctccaggcagcccactgcatcatctataaagttctgcagggctatggtttcaggccgatatgtacacaatcactcagcctctgcccctcagaagatctgcagaaatctaagaagttgtctgcccctcaaaaaatctgcaggtctctagaagccaaaactgatatcgtggcagctgtccccagtcagacccaagtttagataacgaatcaaggaagctgtatgaacccctgcatgtcaaagtcatagctgtttccaaggaaacatctgaaacttggcttttagctcagggaaaatcaataaatgttatacagcacattacattttccacttttgttgtaacaacacagaaggccaataaatgtgtccacccgaggaagcaaacgatgatacggctgggctctgcttgtttccaggatgggtggaatatggtgttcacctggtctgagatacactgaaagatgcagttcaagatcagtattacccagtaacccccagagaggggctgtgatctgctctctagcttagagtcactgtaatgggggtgctcctgaagaaatacaggatgcaactcatgacaactgttagactccagtgtaaaaacaaaaatgaggcttcccagaagcaatgcactgtgtctggtgtcacagccatgcagagccaaggatgagtgcacaggtgaggcagctggtgggaacctcagatttactgacagtctttgcatcagggaaagatgggctgaaatcaaacactaatgtgtttctgtgctccaaggatgcaactatcccctgaaatgacaagagcctcagttaaattgagagtggtcctagccatagccaggtgaaaatgcatctttgtgttagagtgctctgaagtccgggtacccttttcaacacctaacctgctacagttggaattcctggtggcaatcaaagcctttttatttcttacaagagaaatcagggaagggctcaggatgaaagggaagagtgtgttccacaaggtagaccagaaagctcacagttaagagagtgtttgtcgcttgtgttttctgcctctctcagcagctcataaaagcctgcaccaccagagaccatgtgaggttcaaggtggctaggatatcctggtgattctcaaatcccccttcacaggctagaccaaggtggcacacagataaatcactgtggattttatgaatctcaaaatttttgtttgtttctttttgagacaggctgtcactgtgtagccctggctttccccaactcctctcctctcctctcctctcctctcctctcctctcctctcctctcctctcttctcctctcctctcttctctctggatttcccttaattataatagaaactttgcttaaaaacacagaacagtgaacatttcaatgtctccgtgtttcaaggttgcagctaagacaccaacagttacagtgttcctcatcagttatttcacattaagtgctgtttcctaaatgaaagaaagaaagagagagagagaaagagaaaacagaaacagtgctgtacttgaagggaacacaagttgaagtattgcaactttataaccaaattgaatctagcaccctgaaaacaaatactaacagcccttcgtaggtgtgagcgcactgagggctgaaacacccttcaccagcagcagctgaccattgcacctgtgcacagcagcctgcatagtggacacacgtttggttcagacttctacactcagggatgaaaaggaatctggctgggtctcttaggtaccacaagttgtaggccataggtgggagggacatcagtatgtttgagtcagacagagttcttctgacagacaaactgatacccttttcagcccaacccagagccttccaggccaagggaacacatgactacaggctgagggtgcatccctgacttgacagcagctgttcatgtatagtgccagagactcgtgagaaatggcagcctgagttccccacagtggacactggctttgcaaccgagggaatctggggcaactcagtgtagtgaaaacaaggtgtctgttttaactttacatttacttatttgtgtgtggagttcagagagcaacctgtgagagtcagtcccttccttcaaccatgtgagttccaggaactacagccaggtcatcaggcttggcagtaagcaccgtggcctgttggggcatcttgcttgggtcactcactcttaacacacactgacggaagggccgaaagcagggagtgtctatgtgttacgcctccctcttagcacaatttaaaacatgaaagattagtcctctccagtgtggtttctccacagggtcactgtggtggtttgagagaaaatggccgtcaaagggagaggcactattaggaggtgtggtcttgttggaggaagtgtgtcactgtcagggcaggcttgcttcactcagtgtgacagtcagtccacttcctgccaccttctggtcagtatgtgtagccagcactatgtctgcatgctgccgtggtccccgtcttggtgatcatgaactgaacctttgaaactgtgagccaccatctcagttaaatgttctctttgtatgagttgccctagtcatggtgtctcttcaccacaatagaaatcgctaactcaggcagtcactctgcctgctttcttgggagacctcccatctttacagtgagccttaactggtacagccaaacagaaagaaacaccgagaaacaggctcagcaggcaacaagtaatgtcaagaaagcaatcgatgcttttctaatcctttagcatttatcagctatcaaggtcaaaggtcatctcccaccaggagagtctgccttatggtcccagctgcttctcaactcttgatcctctcgtctcaggctctcaagttgagacttgagtttttgtgccgtcatttctgttttccttaaaaatgggtgctttcttgttctgatgttactgaaagtccagcagatgagggaatatgatgacaggggcggtcattggccctgcgtgagtgtatacacgtgtgtgcacacacacttggatgtggtcataggttacacatggaaaacagctacatctcagtctgtacacagtgcttctacgagtcatgttagaatgaggtgtaccagtcttcttcgagaaaaagcacatatactattctgtgcaaagcactgtggttttatgacagatgaacaacccctgaggagcactgaagaatagagaagaacaaagtgtgagagagaactggagagaagagaaacagagaagacagagcaaatcgaggtgtaatgagtctccaggcagctttgctgttggtaccatgggagtggccgtgggctcaggtcttggctcagatcctgaggaaccactggaccttggggattttccgttctgtttttatgttcatttcatgcacttgattttcacttcctttctgagttttagtttctgtcatctgaagaacagggatggcaatgcctacatctgcagggactttgtaagaataagaagcaaccctgtaactgagcaagcacagagtgtcctgagcaagcacagggtgtccggctcgaaagtagatactcaagaaaaagaggcagctgatgtttttagccacattatgagaaataagagaaaattccagtggtgattgcaaaagtcacattcaatgagcacctaccatgcgggagcctccaacttactacgggcctcgtgagtgcttagctccctaattctgacaaggagtttgcagagcagggcttgttatgccttgatcgtgctgcaccttgtaaagatagggtctctcactgaacttggggtttgccattttcactgagtcccaggatcagtctgtctacctcccacctgccaccctggtcctgagatgatagatttaccccacggcatcttgctggtatggagatgctgaactcatgtcctcatgcttgcacaacaagcgtctgacccactgagctatctccccagccctgcactgagttcttacccattgaggaacaaagtaagcatctggaatgttcccaaagcctagacttttcttcacacctgtttccaggaggaatgggagctacaaggaagacaatgtcttctccaaattcttccatgtcacaggaagctgggagccatttagagtcaggcaggatctttctataggaccagacctcccatatagaaggagaaaatgaaagctgggtggctagggctgccagtaaccacagcactttcgtggctgagacaggaagagatgaggttaaaggtcagcctgggttccatggtgagaccccgtgtagcgagctttcctgttgctctgacagaaacagcaaaagagaggaagaattttcttttaacggtttatgcattggttctcagctttcctaactctgcgaccctttaatccagttcctcttgttgtggtgaccccccccccccgtcataaaattatttacattgctacttcataactgtaatgtcgctactgttatgaatcataatgcaaagatctgtgttttctggtggtctcaggcaattgctatgaaaggttgagaactactggtttaggggatacagccccctgccccacccaggcaccaaaggcatggtggaagtggcttgcagctatggcagtggcaaaggcaggcagttggttgcctggcttcagcagtcaggaagctaagagcttatgcaggaagcacatccagcgtacaccccactcagctgtaccctaggtcctacatctgacagctgggcccacatccagagagttcagctgtcttccaagtcaggattgctggttgggaaccaagcattcaaacacacacacacacacacacacacacacacacacacacacacacacacacacacacgggcctgcctacagggaacattccatattcaaactgtaacaggccctgtctacaaacaaacaaaggctgggcaggagagacaggcctgacagtaaagtgctagctgcacaagttgataaatagagcccacagagcgggagcgaggtggagacaggtggatgtttagggcacactgcctagccggccttgacttctctgtgatctctaggctgaccaaaggcactgtcaaaaatgcaaggtgtacagggtctggtgggccattcttccatctcccaccctggagagcgcctctggaagaaggggagggcgactgtggtggtggctcatgaagggccatggggtcggggtgggagctagtaaagagaaggagaagaaaacaaccaggaggaatgaccccaaagcactctgccaggcgagcacggccccagagtgatggtgatggggggaatttattactttctgtgttgtacctgattgcaagaggttttattactatgaaatacaagtcatctaacgtcctagggagggaaggaggaaataaattctgcctggagcagggctggggaggtcctagggtttaaggacaaacatggagagtttcccacttgtagtggccatctatatcccgagcataatgaagtcgcccctcttgggaggggctcaaagcactggtcacagacaacgatttctctctgcgtcttccagggagctgacactaaagccctgcaaaacacaggcttgcccatctgcagagctgaaaagacgcagcgcactgtggggccatggcagagcggcattttagtgagagccctcaacatggcaaagggagctttcccgaatctgccccaaacagcaatggcaggacaagtggcccgccaggtgagaggggagggatgggctgtgaggaggcaggctctggtctggtagggcgattttcttttggggtcctctccgggaggaagagccacctgatctgttcctttgacctcacttgaagtttctcccctaaatgaagtttaaaaggaaaagcatctcattgtcaaagtccaggagagatggaggttgatgatcacatttccacaggacaaaagggaagaaaggagtcaaggcaggctagtgaatggtgggtccacaggaagaggaggaagagcaaagttcttgttgtgtgtctgtgtgtgtgtgtggtgtgtgtgtggtgtgtgtgtgtgtgtgtgtgtgtgtggtgtgtgtgtggtgtgtgtggtgtgtgtgtgtgtgtgtgagtgtatgtgtatgtgtgtgtgcgcgtatatatgtgtgagtgtgtgtgtttgtgtgtgtgtgtgtgtgtgtgtgtatgtggtgtgtgtatgtgtgtgtggtgtttcaatacacataggcgttttgcctgcatatctgtgcaccatgagcatgcagtgcccgaggaggccagaagagggcatcagatctcccgggaatgcagttacaaagggttatgatccactgggaatggaaccctgcccctttggagagcagtcaaccactgagcatttctccagccccagagtgattttttttttttaaagaaaaaggtcagagtttctaattcaacataggcataaaacgagaaggggaagaggagggggacagggagggccgggaggaggtgttggtgggagaggaggagagggtgggggaggaggaggagattgttgtcaactttagggcaaagcttctctgaagcacaagcttctgtgactgaggaacgtggaaggcatcactggcaataactcatcctagaaaggaagaaaatcttaggtgcagcaattgtgcagactgcaggtgcagcaggtgtgcaagcagctattttctcataatcactctgctgttgtgtagagcagggcatggaaaaagcgctaggataatttactatggcttacgaacaataaattaacaggatggcttgcaagtttgcatttcctgctaatacaatacctcctcggggtcactggcaaggaggctgtcaggcagatagtgccagcgacaggtatttcactgtgagggtacagagtgctacaaaggatgacatcagtagcacgtggtccagaccagagcatctgtgctcacaatgacctgtgagttcagacaggacttcaagagcccatgcctaacgtggaacaagcccaatatttcctcactcccaggcccagaaagcacatccttgccttcaaagcaaaggaaaattcttttgtttttgagaataagattccaaaatgccatccaaccttgactggtgtgagccaggctcctgactgaggtcataaattaaccatcacttgcacagctgaaggctggcagtctgagaagaggccccaggatttttacgaccccagcaaaccattcctcgactctccagaaggcagaactcagggcacactctccagaattttatggctaagggcagtagcacaaagttgttaatctcagcactttgacttcagaggcagaggcaggaggcttgctgcaagtttggagccagcttcagctatggaccgacttctagaccaaccagggccacacaaaagacaaaacaacaaacaaaaacaaactaacaaaccaaaacataaagaaacccgaccaaaactcttctttcaaaaaatcttgagtaggaacacactatgtgaaaaaaaaaagtcaaatagagcgggctggaagagggacagcctgggacaaagctacagggagtactcttttgctaagagccgctctgggcctcatagcctagaggacagtaatccgaaatcacctgacgcctctgtcaagagtgacgtggtggagaaggggatcttggggcaggcagatgaatcggaaggcctccttccacttcctgtgaatagatgccccactgctatgtcggggaaagaggaaggaaaaaaggcacccactgctcttttctgctgattcaatttgatactgcatccagctgctgccaggatggcgggtgagtctgcggggagcctcaagggccagaagaggctaatggagactgtgccccggccagctggtctactcagagggtgggaagctgtgggggaggggctgggtgaccgcttggtcactgccattatcactacagctgaggggagcaagacttgaattctaataagcagagccccacgcagttcaatacaattctggttggtactggagctttacccgggaagaagagagggaggaaagaatagagaggagctcccatagtgcctactgctgtacgcaggtatgcagggcatcttggggacaatcataggccattgcagccccctcccccaccataaacacaagcacctgcaaaaacttgtatactaaaacttcacactacagagaacagtggcggagcaggaaggtgcctgcgggtgcagaacaggacattcaatggctggggcggggccagtccctctagaaagacaacgggaagttcagggaaagagcgccatcttggggcagggctgcttcttccttgtaggtggcactaaggccaagtggttcccccagcctgctttcttgctgtaaaatgacttatcacttggaattgcctcaaggctgaagaaagatgacaagggggcatgcctgtttctcagatgactctccacaagcagacagggtggacagctgctcctagagaggcaaggctgactgactgcgatggtgagttgcttggcctccccaaggggacacacatgccccaaatcaaagacaccctgcctcccactcctcagaggcagcccaagtgaggggccctcccagggcagagtgtgccctggtaaagaacagacaggagggggcctctgggtcctagaaggctaaggtgtggtgtcaaaaggcccaggtttcaggggacactcactctgggacgtgatttttcttacacctttctttctgctttacttcaagtccagacagagtagtgaattcagcagagatgcaatttgaggcctggaggacaggatccctctgcagctgccatcacacctgcttctgactgtgagtgggatgtcatgacagaataaaggcaccactgtgtggctcagaatgacacgagatctaaggcagtttggggtgtgagaatacgcctggggtacgcctgggctggaaggaaggggaggaactagcttctattctagcaaggagctactccaagtatggtgacctttggggcactgtttcctcctgctgaagaacgccagtacagaagggagaaggtgatggagaggcgtgggccctcccccaggatagccgcttggtagtgtcagagcctggggctgtgtgtggggacctcagtgggcacattttcagacttcaaggccatagccaagccatctccaatgctcccattcatccccacagagaaggtatttgagtgtggcagggtagggtgggtgagagatgtagtgatgaagtctacagctttgtcttcggtgaaccctaattcaaaatgagcatcaggaagccagctatggtggcccgggcctgtaaatctcaatgctccagaggttgaagcagaggacatcaagtttaaggccatcctgggctacctgaagagactctgtttttaaaaactaggtgctgtggatgtagctacctgcctggcatgtccaaggccttggggtcaaaacctggctctgccgggaggggagctgtcagatccatgatgtccctgaggtgacttttcttctgccagttcctttgttctcaaagttctaggtgggattctctatagagaagtaagctacacatctaatctaagcctttcttatttggacaccaggaaggagagagattctaagcccccctggcttgcctggtgagaagatgacacacatgaaccaggggaccccacctctggcttaaagaagtgagctggtgacagtggatttcatcatgggccatgactggcagccacattcctgggaagagactggatccccattgctctcagttttccaccccccccccccgggggtgagagtggggcactcagtgtgtgaggctgggcagcctgtctcctaggagctctctgctgcaggcaaaggaggcctgttatccgatgctcagaatcctgctgcctctcctttgaagtccctgggtgcttctcctggagggagaaatcacggcaggccggctgctgcctctggtacctgaatgtgttttgacttgggaacaaagtactctacaaaatgagtccccacatccgagctggctttgagctgtgatctcaaattggaacctttcaagttatttcacatttggccaaacagggttcttctgttttttgttgatcccccttttcttatgaaaaaatgctgacctaaaaggtccctgggcaccagtgagttctgaggagaccacaccgcagcttgctcggtgactgaatccatctcttattacatctccttctctccgtccgagtaagctgggccatgcagaggcacaggggatcactatggactcatgatttagaggtctagtcagctttgctcctggcaccaacgccaggcatgaggccaacacagccttgaccatctagggcagccactgctcaaatcatcacagacaaagcaatagagtagctgttctcaatctgtgggtcatgacccccaaagtccttcggaaaacatagatgtttacattatgattcacaacagtagcaaagttacagttatgaagtagcaacgaaaataattttatggttgggggtcaccacaacacgaggaattgcattaaagggtcacagagtaaggaaggttgagaaccactgtctagctcgatctgcctgctcctcttggggataatccaatggacacacaaaccaacctctctgacccatcagcagcaagtagcccaccagccctctcaatcctctcagaaccaggaaggcctcactttggaagtccctttgcggggcctcagagctggcagcctgtactgtagatgactgacaggtggggtattctgagctcacccctgccttcaggactgtgggtctcacctggagcagccagagctacaggcatcccagagcagcagagatcttaagtcactaacttgtcccttggtcttgcagactccacagcagctaagcataaaaatgtttgctgaatgaatacatgaatctcacgggcatttaattaaaacaacaaacagccccggtttgagtgtctttcttttcaaagcctgatctgacagattgtgtggtctttgccagagggaatcatggcgccacgctttatttctaaccgcaggtccaggtcctctgactcagcagtgagagactgacagccagtgtgacacgataagcccccactacacccatcctccatcatgccctcccttccgtgagggactacgatgtcctcttaaagcaggctcacagagagcgcctgtagtctcagatgatggggcgatgcccaacgtttctcttattggctgatgaataaagcactgtttggccaatgaggcaggaagacaggagggactaggcgagaagcagaagtctgggaaaggtaagcaggagagcccgccagaacgggcgcaatgcagcaggcaaagagtggcaggcccagcattctctggtaagccaagaccacgaggaaatacacagattagtagctataggttaataattaagacagctagccaataagaagccctagtcattggccaaaagatttataattaatctaagtctctgtgtgttcatttggggctgaagtggtggtgacacctgctgggtcagaaaactcatgcttacactcagaagagactatagacaactgaacagtgttagggcaattaaaagatcatgcagggacttcagaggttggactggatgccctttgaaatagcagagaggtgtgagcttcgggggaccagcgatagaaaactgtggtttgaatgtctgaacacctggtgtgcaaccagaaggctggaaccttaggaggcagaaacttcctgtaactggtgggtaactgggggtgggccttgtgatttcatagcctggtcccacttccggtctcttctctgctttatcaatgtggacacaatgtgactaaccacctcgctctcctgccactgtgccttctcatcaaatgcaccatgtcccctcagagcgtaagccccaaaacaaacccgtccttccccacatggaagagaggtgtggggacagtgaagactatgaatggagattttaattatgcagaagccataagccacagattcggaattccaagttcatatttcagtcatccgttctctcgaccttgtcacttgcctggaataagcacggtcacatgatctctgtccctgatccaccatttgggaaaactgttgtcacaaatttctgcaactggatatgcacagtgcacaaaccacttctaggccaggcagaagcctggatgacaagagaatgttccagacactaaacaccttctgagggttcgtccttccggagaaagagagtgcttttctgcagccacacacagctggcttccacacagtcccagtgttttagggattctagagtttttatcttcttttcctcaaccgtgtgtccaccggctccccttgagccactacccgcatagttcactctcttgtctgatgccccgctctcctcccacactcccatccttcaagcccttgggccagcatcctccatgcactacggccttcacacagcccggtgagctctgtacagcttcctgctcagagtctgagaaataatgagccaggcgtctctaggtagaaatctcacttttcagctgtggtgtctcccactgtccccacctccgagccctccccagagcagtagctgtgtgtgtgtggatgtgcaggctacagcaacaatgcagctctctggatggtgaggtctgtcttgttctccccgttagactgtcaactctgcaaacaactgaattatgtccttccctttccttgcagttccccggtgcctgggccagtgctgctctgggcctcggagtgttcagtaaagaggtggtagagttcttggcacccagaagtgagagattgctcacgctcactaatgaagatgttttgcaaaaataagatttggattcagcataagtatgcatgggagagagacagacagaggtgacagtggcagagattaaagggcctgagaagagaaagaattaagatgcggccacacgaggacaaacacacagacctacaagagatgccgacatataaaggctccctccttgcccaaacagaccaacatattcatctgcttcagcagtggtttaaggctttgtgttctcagaggctaaatcacatgctataaacctggggacacaggtgtcttccagaatgtgtcccctgtcagtcagaggagtttaacagtgcagggtttcaaatgcacaaccttcggaatggtccttgaaaccctttatggcaccaccacgacttttcctttctaatgatcacctcctcataaagcttgaccttgacgatgaggtcactcagacgttggatcttcaccccacgagggagaagcggtgccatgtggtagaaggggccatgtatgcaggtctgcacaagtcctgccatccaccaaggtgtcactgcctcagtctgaaagggaccaacaatctctgcctcgctcccttactgaaacagggctcccctgtagccaaggatacctggtaaatccaacagcacagaggggcctccttccagcgtatctctagggggcaactagactagaaagacaaattccttcctatgcagcaattattttgatttctttacttcaaaaatgactataaaatatcaaatcatctttctgttagactgtaaggcaatttgtaccaattaatgagacaagacccatggcttcaaatgacagaggcccagaccaggtccgtcacgtactcaacctgttactgagcttacagaagcctgtgtttgctcatcatcaagatgggggtgagagcagaaaagagatgtcacaagggccaaaggacacggtggtaagagccttgcacatagctcgtcagctctcaaagttgactgtctgttgttaacataaggtatttccaaacacagctgagaatatgcagatagccagagagctcctgaacaacccaatagtgtcatgccacatgagccttagaacctggacactttattcagtcataatttatttagggtgactttatacctaaatctaagagttatggtagacccttgactaacactaggtgcacttccttaaaaatattaaatctggccattacacagagagaccctatctcacacacacacaaaaaccccaataaacaaaaaagagagaaattgaatttgttatcatactgaagccttatacttccatgaagtatgatcaataccactttctattcaagatgctattaagatttccattattttaaatcctgtgtgtgtgtgtgtgtgtgtgtgtgtgtgtgtgtgtgtgtgtgtgtgtgtgtgtgcatgcaggtaggtggagactggaggcaaaggattcccctggaactggagcaatgggtggttgtaagctacctgatgtaagtgtgggaaccaaacccaggtcctcttaaagagcagtgtgtgatcttagccactgagccaagtctccagtcccattgtattatttttgagatgtaattttatttagccaaggttggccttgactcaccacatagctcagggtggccttgaactccggagtctcttgttttgacctcctgagtgccgggatacaggtgtgacaacctgcatcctacaaaagatgccaattttatgtggtattggggatcgaacccagggtactaggagtacaggttgagttcggggacagctggagtgacatgtatgtgtgacaggtcctctgatggtgggaggttggggaaagctttttacagctctgcttgtctacatccacccactgttggggtcaggagccaacggatttaacagtgtcccccctcccccagcacgagatacatagcacagttaggtaggtcttactataccacgaagacaatcaaagggggaaggtgggtgacgtgtgaagggttagattaccagggaatgctgacctatgctgtttaggaggcaatgataaacaagcaatgtaccaatgtttaaaaatggaaggaagaatgaaaaaaactgtcactccctggatgactttctcatgaatctttgtattttatttaacccagtgctttcatttttacttttttttttaacagataaaattttgttgtgttgttcagtctcaatcctcctgtctcagcctgctgatagctgggattacaggtgtgcaccactgtgtctgatcgctgcctgcttgagtttctgtgtggtcccgagtatggggtaacccttgacttactctgtctgtgggtttagacttgtagcctttatacgtctggcctctgatgctttgaaagggctcataaacaatttccatgattattttgaagagatgggcattaaaaacaaagatgctaaagttatttaaatggtgggggaggcgctgagtggccttttttggcacaggcagccacctgaagggtttccagatctttccttggccagagctgagactggcaacagaaacagggcatgtgttcttcagcagtggggcccgttttcagccatagctctgatggctctctgtttataaccttagagcgctgcctcttgaagttagattttgttttatgtctatccataccgtattctctaggctccataaaaagctgctttccaagtccccaaatgaagcttacagaatctgactacttgaaatgcagttaaggcaaatttgaaaagatcctaaaacaggcatttcaaattgataaaatcataacaatatcttcaaactacccttgatttctggtttttgtgaatagggaaaatcctccaggaactatgaaagcaggccctttcatgacagcccacactcaccacggcccacaggcagtatgtggacaatggagggctaactacactggaaacaggggtgaccttgcctctggagactaggctggccagctttaacagaggtaggaaatagtcaactctatttcagagtaaacacacacacactgaaagctatctttgacaacttatctgttataagcaatttaagtacaccagggtgtctcaatgttaacacctctaccctggcctctggccctgtgaaatctggactacgtgggagatagagacgtgtggggactttaagggatagcctaggactgccacaagatgaatggcatggcatggccatccctccctcccacatgttcctcaactcttctctggggaggcgccatggtcctggccacgccctctctctgtctgtcttctctttagaaaagttttctctcattgctctactccccttctgccagcctctactccccacagcaaactcccaagcccactcctccggatggctgcaacaggaaacagtaagctatgcctctgtaaacttgggagtactgctttgctttgacatgctattgttttggaggagttaggttttggacaggtttggaaggggctctggaacagaagctcccccaccccgccccccaccgccattttctcatagaactcctctcccacccatctgttcggatgtaagaaacacatccattgaaacttcaagaccagagataaaccagggctgaagccgaatgttaggcttcagtggcagagggtttttggaaccccgggacactgccctgattctggaaatggaaggccagccttcccagaccccaccaacacaggcctctgatcactggtctttagcaacaaagccctataaccacacagatgtcataaaaacagggaagagatggctcttgctttcgacttccaagagtgtctcacagccaaacatttatggcttaagctataaatgcatgggaaaatgggagaaacattgacacaacaataaatgaggggagagaccgagacggatggtgccacaatgctgtctgttgtcatttggtgcagagaaaattaattttgaaggcatttcatttaactttgcaatgttttgccatgtgacatctgactatttcaactccttttatttcccttcttccccttaaatctgagaacggtggcgggtgggtcaggggggagggtcagtctaatgtctaatggcagtggatgatctggacccaggcaagcaaaagtcactgctggccgtaaggaaatgcctcccacttccaaaagactaatatgtgttaccttccagagcaaggcaccggggtgggctggacgtccagataaggttgtgtaagcattcgagatactcagaaccctcgagtttaaatccagggaagcagcgataggcgatcacagttcccacggggaaggaggtctggaactccgagatgttcacatagccgttggaagaggctagaggtctcaggcagcctgtgaaatgtgaaaggaaaagaggaaaggtttccctgggctgccatggcactcttcaggattgttcgtcagcaagaagacttgggctatgtggagacagatgcttgctggtatatttgaaatggtaccacaagggttggctacagggttagcgggaagaaggaaggcaagtaacatatggattggcacatccatagccaggtgaagctgtcccaaatggaacctcagcaagacgggaggggcttttacaaaccggtggtgcccaggccccatgcccaggaggagagcctggggggtcacatgcttatgaagctccctatgacatttaaggtgacattggaccactggggccctctaggaggaaacagactttacaagagctaggggtctatgacttgggcaggttatgttccaaactcaacacaggccagaatcctgcttaggctggcactactagatttctagatatctgatatctattttctcttgaaataggtcaagagtcttaaagtgtgctcaagcttgagaattcccccagagggcttgatagacaggctccaggtctgaagtctcagcaggtctctgtggagtccaaggatgtgcattgctagtggccaggtgggaggaccctctgagaagcacactgccttgtaatggctctgcacgcactccaaacagaacaagttgtgtgctgtcggagaacaaatgagaaacttgtaagtcactggccgccttcaggtcttgaagaccatgccattcctaatggcacggaattctgtgtgcgccattcccttgctgagggtctctctcagcaagttgtgagggaaggcaagagaggcaccagggatgcagaactaaggacagacacagtcactcacccttgcaattgtgtggtacctacctcacggctgtgccttaggccacaaaggtaaacaatctgaacaggccctgacccacaaccagtcaggatgtttctagaaccttcccccacccctcaaagcagcagaactcagcatctttttactccatctcatgggtttctcgattcctgctacctcatacctcagtgtgtgtgtgtgtgtgtgtgtgtgtgtgtgtgtgtgtgtgtgtgtgtgtgtgtgtgtacatgcgtgggggctgaagactgatgtcagatgtcttttattgttctctctctctctctctctctctctctctctctctctctctctctctctctctctctctctcttccgagacagggtttctctgtgtagccttggctgtcctgcaactcactctgtagaccaggctggcctcaaactcacagagatgtacctgcctctgcctcctgagtgccactgccgcctggcttcttttgagacagaatctttactgtaccagggggtcactgtcttggctcagctggctgacatagagatcaactgccctgtctctgtataccagcactgagatacagatgctcgcttgtcaccatgccaagcccagtttctgcggtcctgcagatcccacctcagattctcatgcttgcaggcactttaccaactgagtcatctcctgtcttaaaaactcttagatggtttttaattttcctgagctaaaaacaggtaatgtttgcagcaaaagcaaaacatgaggagtctgagggaggagtgggaaccaggaagaaacggcatcagtaactgagaaacagcggataaacccatcaacaggaacaaaaggaaagcatggatgtttacatggttcaggtggctgacgtggtgctgaccccgtcctccctctgtgatggggtcccagctctaagatgatgctggtcttccccaaatcacaactgattctgccccacagtgagcagggctggcagacactctccaaaacctaaagtagccgccaaaaaaaatggcctttgagcagcctgcccttcactcctcctgaggagatggcaggagctataatttgtacggctaatcagcactgagagggaaagatatgctcactcttggttggagacagcccatcctaaatataacagtgggaaacaggcttccactcaatagctcaatgggattttcatttgcacttctagataatagagatgcctactggagctttagcccctggatctataggtgcaaataaaagttctagaacaaaatgtcactcttaagagccaattacaacccaccagggggctcggagaggtgccaagctgtctgcagcgaattaggatcctccttcctgtgttgtgccagcttggcggccagaggaaagccggcgcgtctccagcagcaataacgcacaggatgggctgaggccagagcacaggcaggcacctactgggtggggtggaaggttctgagcagtgacagtgcagggctgaggcctgtagcatttgaagatgcgtatatcttaagtgtaaccaggtgcaggcctgtcatcccagccacttgaggcaagagggtcacaagttcaaggcctttctgggttatgcagtgagttcaggactagcctggggaatttatcgagacccttctttcaaaattaggagtgaaaaggaatatgggcatagctcagaagcaggacactgacctagcctgtgtgaaaccctggtttcaaatcctggtaacaccataaaatgaaaagaaaaacaaaaggaatagccattcagctctctagtcgctgacctagaaaagtcatgtcttgagcagaatttgagagagggagagggacccagattggccagacagagcaaccgagagacacatatctgaactctttaacaccccaaaaggccacggggaaaaagaattcctaaggaacacggtgtatttaagcaataaaggggaaactagaaagagcatgaggacacagaaaggatgtagagaaaacagggctgcagggagtggctggagtcagaggtcattttcctcaccggggactccagccctggaatgaatctgtggctaaagatgtttatttgcatgagcagcccaacccaggcgccagctgcttgttttgtaggcagtctctgaacagataaataaaacccacatctcttttagggcaggctagtggcacaggccacagggcaggagtgtggcagcggctgggctcctctatctccccttctttcctccgtagggtcgagactctagagctctcgtgtaggaaaacaatttattgctgatgatggggaacacaaagcaataccagggcctgccaggtgtgatttccaagcacaaagtcagcattcatctcaacttgaacatgccagagcaaatctgaatgccttccttctccctccaattatgaattatgcattggcttttgggtccttcagaccaagtcacatgtcaaaaaataaaatcagaattaatgtgaactcaggggattatttttaaaaacaggttcctctgtatatggtggccggggcaggttctaaaaacgagagggtaaatattcactgtgtggtttggaagcatttggatgtgattacttctatgcttttcacgagttataaaaagggataacactgtgtagaaaaaacagtccctgtacgatgggctcactagattctctctacaactcagtaagtattacaccctgcaacttccattaagtagacaacaatgcatccatgtgttcacagcccagttacaaagtctccaaattcttttaaatttattgttattgttgttatcattgagtgtgggggcacacacatgtatgtgtacttggacacacatgtatatgtgcaagccaaagtgcctgcggtggtcggttctttcctaccttcactagggcattccagagaccagatgcaggttgtcaggctggcgagcgagcacctccctgctgagtccctcttctagcccaattctcctgattcttaaactacttttatggttttctatgggaagggtacgatgcccaacatactaaagaataagctctctcctgtctagactgggaaacctggagctgagtcaccataaggagcgatgagattctaagagaagtcacagaaagacagggaggacctaggtgaggtgactgcatttttctgacatgatctctgttgctgtgtgagagaaccacgtgcgttctacaatgaagtcacggcaagtacagttgacagcagcggctcccatcccataccttgacagatgggcaagttatcccacgtcccgtcattacggcataacgaaaccatgttgtataggtcagggtaccgaatcttgtatccttcatgacaggtgacgattaacttttctccgtgtctgtatgtcttgttatggatgtcggcatcttcaatttgggggaggcggcagtctgcaataaaagatgagtattacttttcttgcaatttaaaatggtcaacagctttacaatgaagttcttatttccagccctggtctcaaactatacaacaaacagatatgtggtacctcacctggcaccaaactcaggtgacaatgataagctcacagcctatgtcacaaaaataacaggaagaggaacccagtgtgcaggaaccaccttacaaaacaattttatttgctgcctaccacacttcctatctgtggtagtttgaatgtaattggcccccaggagctcatagggagcgccactattagaaggtgtggccttgctggaggaaagatgtcactgtggggtctggctttgaggtctcctatgctcaagctatgccaagtgtggactcagttcacttcctgttgcctgtggatcaagatgtagaaccctcagctccttctccagcatcacgtctgtctgcaccctgccatgtttcttgccatgatgataatggactaagcctctgaaactgtaagtgagccactcaaattaaatgttttcctttataaaagttgctggggtcatggtgtctcttcacagcaattgaaaccctaagacactaccagacggttgagctcctgaataatactggaaatgaataaagagctggctgtgtttttggaaaggatttaacatagtgtaacctgtcatgttggttgctacagccacccaggcatggtgcagtgccttgcctcagcctgatgagcaaacatggtgtgcagaacagcatggaggctgaactgcctctgcgtttgctaccaacacttcccatctacagtgtatgctcttcaaaggatgctagaccagtgtaacaatagttctttccaccagctgcctgggttctgccaccactttggggcccccaaataacacacagagtcctatattagttacaatgctgctggccaatgactaggatttcttatttgctagctcagtcttaattatcaaaccataactactaatctatatatttttatatggacttatcttaccgagacgctggccttatgtgtcctctcttcctggggtcacacggagactctctccctttcctgtatttcccagaatccaccttctttcctagtcccgcctaacttgcttccctattggccaacagtgctttatttatcaatcaataagacaaacatacacacagaaggacctcccccaacagaccagcacatactatggacaacctctagggttcaggacatctgggcatactatgtccttacatggagtggctgagaccaagtgaaaaggacagaaaggataaacagacaaagtttaaaggggaagtgaagacatgcagcaaaacaagaaaacagagcaaagagtgcaagatgagtgtctgcttctggtcctatctacttatacaatgcatcgtagaaacaaaccacagtgctcttccttgccaagctggcactcagctcatcctacctctgaacacctcacagtgagtcacctggtttaagtcacatcggccactgtgtgtttttaccatccctttctgtttctcttaaatgtttctgattttgtgtattttattttagtgttggggacagaaaccaggacaccgagcctgctgggtagatgtcctatctcaaggctttactgccacctctgataaatgctctgatcttagatgcacatctgtttataagtatgacctggcgatgggttatactccaaatttctgaattcttaatatttttgaaaacaaggcaaaaatctaaggggagtgtttttcctatcagaacctttctccggaaactctccaatgtgctaagggatctttggctccttagctgctccccagagtctactgaatgcacgaagcagctggaacagcattaataagagccctgttcatcaagatgcttcagcttggaattgtcagctctgagccgccgagccctggtacaggtaggaagagaggacttcacagtggctggcagatgctactctacaaagcgcccatcgaggacataatggctttggcgttaggttctgtagaagcagcatcggataggacacagcagattccagaaatcagggcatgcacaatggagaagactcggacaagaggcccccttgagacagacagagagagagagagagagagagagagagagagagagagagaccgcagaggttattcactgcagatcatccagaaggccaggcgtatctttatctttgccaccactaacttgagagcaagacccatgtcaattcgacacaagtgacacaggtcttccccagcttttccccattcccagacccattcatgctccaggcaaagaagaactgcagtgagccggcactgtctaaagttccaccaagaaccctgggagcgcacagccctctgagcccagctacggggctttgggcacacccgggtgtcccctacagtctctgctgaagagctgtctactacctctcattcatgctatactaggctgtggaaaacagtgctctaagtagtcaagttaaaccgctagtttctgagtgaaaatagcccaatttcttccaaatcaagcctggaatagtcacaaggtaactgacaactctctgcacaccagcgctgccgtcttcttaatgggaaatgtgaattatgtttttctcaatggcactaggcagaaattattcacagcaagcaaaaacacatttatcaaggcatctgtctgtaaaatcttggtgtaaatagttcttgaggtgatgatgtgtatgtcgaagcaaccatcccatgatggactttaaatgtctttaagaattagctggaagagtctggaggttgccagtttggggagtaaaatctatggacagagtgtccccttggacatcacagccaggttgacattggaaggtcagagggagcagctcccagggcttgctctcaagattgactctccagcctgtgttaagattaatgtgggatgattcacacaggtttggtgtgctgcagtgtgtgtgtgtgtgtgtgtgtgtgtgtgtgtgtgtgtgtgcggtgatacactctgttcaaaaagagactgtgtggaggtgacataataccagttcactacataggagagccacatagcagtaggctttggagttcaggtcccactaaggcagagaaacatgctggagcacgttctaggcccaaggggaaaactagtccagaccagctctaacagaccttcaacagaacacagaggcactctgactgtcacgcgcaccgtgtggcacccatctcttccggaaggaacggtaaggcaagtgtaaggcaagttgttgactggagtaagtatctgcccctacaagctttggtgacggtacataagcatcggcctcatttctaggaaaggatcaggaccttgaggatctgaaaatatatgtgtcatcttcattaatgctggagttagtttcacagaggaatacggacattccttggcttacacaggtgccattcccagaaaagatcactgtaaattgaaaatattaaaagctgaaaatggggctgggagatggctcaatcaacaaaatgcttgcaagcctgaagacctaagttcaattcctagaaccaacagtaacaacaacaacaacaacaacaataataatggcggcaaggtgtggtggtgtatgtttacaatcctagagaggcagagacaagtggattcctagggtttgttcaccaggctgtctagactaatgagtgggtgaactctaggccaatgagagaccctgtctcaaaagacagggtggatggcactcctgcaggatgacatccaaggctgtccccagctcccacacgcctgtgcacacacatgcattgcctcccttcctcccaccacttgcatgcacacacagcatactgagcttcccagcccagcctccagtgcagggtagagtgtgggtcactttccctcactatcttgctgtggagtagaagctgcagtctgcagccattgatcggcatccctgccacggaccactaacccaggaaagcgcaaaattcaaaatgccaagtacggtttccactgagtgtgcattgctttcacatcatggtaaagtcgaaacatcattaaggtgaaccattgttgagtctgggacggttcctaacacaatttcctacaccacagattcatccattcaggaaaaaaaagtcacaaagccacttcaaacctatcattagcaaagactagacgcatctgtcaatatttgattctgtcacacagaatcgggccaacagttagcacttaggttggcgagccataaacgtgcacttctaggatgcagatcaaggggtaccaaagggtcccactcagaaaagccacattccaccatcccgtcccaaccactgctgcgcagtgaacctactgcaaatggagactcagtgcaaggacaggtaccagcaggggaggaagacccctaggcagtgctacacaggcacaccaagtacagactaagttgttagagcgtcagcagagtgcagtcccaggcggtgagcaggcacagggagagtcaaacatttcttcaagattttggttacatgtaaaattcataaccatccccaggaacatgaatatatgatgtatagatacgtaggagccttacaatccgcgttattatgtttaaggctccaaatgccttgctgtaaataatttgacttacgttcccaggaactggcatttgtaagtcttatttactcaccctgctgttcattcattcactcagtgactactgagcccacactctaggtccagtgtaccctaggtgtaggggacagagaagaagtcaccatttccactcttaacagcactttcgtggaggaggtttctaaccgaaaaattaagagacaaatgagccagaaaataacaggcaaatctcactactgcgatgagctcatagtatggcgataagatagggagtgacttggggactcatttaattcgagcagacaggcaaggggcctctgaggaaatgacatttattaagctgagacctgaatgacagcacagatccaattacatgtggatctggagatttcaggcagaatggttaggttagcacaaaggccagaaaggagcttggggccctaaaacacaccagagacctgtgtgtgtttggaagacagcagccaacagggggaaggaagggccagaccacacggggcctgacagattaagacagggagtggggttttagtttagtaggatgggacactattagaacccaagcatgtagaagggtctagtttagtaggatgggacactattagaacctaagcatgtagaagggtctagattatattctcaaaaggtttgtcacatgtgcagtgaaggatgaaccttggccaaacatatggtcttgtcctcaggtcctgggaggtaccctctaagctcctggagtgtcctgcctggacccatcctcacctggtggtgttagcatgctatgtaatctgtgtgacttgagacaccaaatatcagttcagcttcttggtagagcgggcagaccaatttcagcccactgtgtctatatgaaagaaccacaataaaactctggacactaataacgttggtgagtctctctggctgttaatacactgtcatataccactgttgaaggatatgcgctgtccccacagctctgctgggggcttgtggctgtcacccctgggtcctgctctacataccttttcccttggggtattttgacctgtgtgtccccgttgtaatatatttatccacgaggatcatagtttttctaagttatgtgagtctgactgaattattgaatttgaaagtggccctggaaatccccagatctgcagtgtcagaatgagggccctgagctttgtaccattggatggcattttaatttgcaatctactggcatccattaactagtcgctgtttccttcagtagaactcagagtgaccaccctgactactcaggagcaggctgcagcccaggaaaatgatgtcattacagacaaccaacatggaggtgacagctaatgctgtccagaagggagctgacagaagagacggggtgccactgagaaaagaggtgccaccctgtgtgtggccttgttcataagcagggctggttctggatgtttctttccagaaacatcaaagtcaacatcaaaggacgttgactttgatgaaacctgatgtagcattggaacaggacacttgatcgcttgtggctctacatgaattctactgtgcaatcattaggtccctgcctgaaaccactaagaaacacacacagacacagacacatagactcacagacagacagacagacagacagacagacagacagacagacagacagacacacacacacacacacacacacacacacacacacacacactcactgtggggaggggctctaaacaattatggtaagtacactttttgtgttttgctacttaaaagtactccccctttaagaaatactttcttttcttttttgagacagggtcttgctacatagcccaggatggcctatgatattgtgctgagcttaaggtacttattcttgtatttttatatttacaacttaggtggtgaatttctgtgaatattagctgtccattcaacagggcgagactgttacacgttacatattctggagtattcacaaagactgatcacatgggaaattcagtctccagaaatagcaggtgattgaaattactgagcatgtatttgggccacaatgaaaataagacagaaatgaattcttaaaaaaactcctatgttggaaaccgagtaatatcttcctaaataacccatgggtttgatgaaacaacaacataaaaacagaaaatgttttggatggagtaacaatgaaaatttgcatattgtaatttattatatgcagataaatctatggctatacatttctgtttaagcctaaatacacagaaagcccagcataattgctcacacataccagtaatcccagcactcaggaggtagaggcaggctggcctagaactctacagtttggggttagtctgtcagggccacacagtgagactcaagaaacaaacaaaagagtatctaagtacacctagaaaaattaaatgcttaaaaaagtcaagaacacacaccttagagttgattaagtggaatttgccgatgggttgttcaagttttctatgttagttatgtttttattgcaactgtggacctgtgcttaaagttttaccaagacatgttactaggcatacataaattcagggttatcctttagaactaaaatgaagagttcgaaaatggtacagaaaatggataggtgattaaacccaaagaaagtacaaggaaatacattaaataaaagagtaaatgatagagaaagctttaatgaagctaacaaggaccagcgagaccaagtattagtcctttgaagtcacaaccaaatcactgacaggatttatcaagaattacacagtgcaccccaccatgtaaggataaaaagatagcacttgggaggcagaggcaggaggatctctgtgagttcaaggccagcctagtctccagagcgagtgccaggataggctccaaagctacacagagaaaccctgtccttaaaaaccaaaaaaagaaaaaagaaaaacaacaacaaagatatggcattggcatagcctacattaaaaaatattaaaagaccaaaaactccaaaaaacctgaagtcaaaacatttgcaaatttagatgaagtcaaattcttcaggcagggtaagaaatcctattatttacggaagtcgccaagtaacacgtacataaaacatcaagtaaattcactttaaatcagaaaggcttcccacaatacatactccagacccaggatacttctctgtgaattctctgagtatctggggctgcagcaacctcactcacaccctgtgtgagcaaggtgaactcttctgcagggcactggcatgtttataggggcagtctcccttgattattatacagctggaaagaatgccacagacaggaaaaacattcaggacagcccacctcagcaacacaatgcagaacttaagagtcacgcatcagtgaacatatttcaaacacatcacaggcacgacgacttaacatctaatgatcaaccaatgtgacttgaacacttaacagaataaaggagaaaattaccatcttattagaagtgaaagagcatgtgataaaagtccacatccactcatatgaaaaagagaaacattcttaataagcccggaattaaacaaaatactgcaatttaataacggatattattagaaaagtaggtactgtaaaaatctagaggccaacaatttgacatttggcccctgactgaaatgctcactcctaacacttacgttggatgctacactgggtttcacaggacccaaataagagtaaagtggaaagaattaactagaaatagagagaagctttagtattcaaacatggcatgactataccatgtggtgagcccaagaataatttacaaaggcaggagctattgagatgacggctcagcggttaagagcacttgttgctcttgcagaggacccaggttcagctcccagcacccacatggtgactcacagccatctgcaactccagttccaggggctctgatgccctctctggcctccacacgtgtcttctggtctccaagggcactcagcatgcacatggaacatacccatgcatgcaggcatactctcatacacacaacgtgaagtaaataaataaaaaagcgttcaagaatttacaaatataaatagtaaaattattagtagttgaatacatataaatttctaacattgatttaagcaaacttaaaacttttatgaagcacattaaaatttgaattgctaaattcaaataaataaacaagagacaagacttctatatagaaaacattattgagaacaactgttaaagaccttagtaagcagggagaactaatattacacaggtcttattttccgcagaattttaactataaatctgtcctattttttttctagttgctatgacaaaataccctgacaaaaacttcggggagaaagggcttattttcattatgacaccagtttatagtcatagcagggaggtcagaggggtcacaaacttgaagcagctagtcacactcacactcaaaagcagacagaggatgaatgtacacttgcttactgctcagttctcttgtccactctcaacacagtacaggacccaggcctaggggatgctgccacccacagtgggctgggtcttgtcacttcaattgacatcatcaaaaaaattacccaaggacacacccacaggtcaacctgacctagacagttcctgaccgagaccctcttcccaggtgactctggactgacatcacaaaaaacaacataataacatttcagaatccaaacttgtttcacagttgctgtgcttgttctaaaatggaaacatggaaggccaagacagtcttgaagaaacagagagagggggtaatgcctgtgttaagagcatttgagagcaattacaggactgcagtcatgaactcagaatcacatacagcacacagcagacagaccaacagaacagagactgagtcagaacttccatttcctgacataggtggccacgggaagcagtggggacattcattccaacgaacagtgctacgtgtgttatatatacaaaccaagtccaagggggatggttagagggctaaataagaaggcaagacagggaggttctgtgatcacagaagaaaatgcctttgcgatatcataatacaaaaacatttttgaaagattttctttttaaattggtgtgtgtgtgtgtgtgtgtgtgtgtgtgtgtgtgtgtgtgtgtgtgtgtatgtgtgagcatgtgtgagcatgtgtgaatacaggtgcccgtgtaggccagtagagggcatcagatccccctggagctggagttacaggcagttgtgagccacctaacatggatggtgggaatcaaacttgggtcttctggaagagccttctctccagccctgtgaaaacattttttaatgtgacaaagaaaactcccacgtaacttccgcataaggaaaaagactgataaattcaagttaaaaaattctgtgcatcacactgataataagagagtaaaaccttaagccagagaacagctttgtagcacctataaccaacaaaggactcggatctagtgtatataaaatctcctaaaaaatcaatatggaaaagacaactaatcaataaatggttaagcgaattgagcaggcacttcacaggagtgaatcacaggctagccaataaacacagaaagctcctcaactttattattcaccggggaaacgaacactgaaggtgggagacccagggagtggtggggcatgcctgcaaaagcagaacttagaggttgagcaggtgtgtcctgctcagtagtacactgtctcaaaaacaaatccaaacacccaaccaaggtcaaagagacaaactcctaaacgaccatccaccacaaagctagagagagcactgcatgccttccaggtggctaaagcattgctaacagtaagaggcatgttctgtttgtgagagtataaactggtacaaccacttgagaaaactagcaatgcctattaacactggatatatgcataccacacacctcggcagctctaatctctgggacagagccaacagaaatagattatcattcttcatcaataggcctgttcagatatgctcactgcagcgctatttataacagaagacaactggaaaagtctaaaatgtccaccaaaatgaatattcaaatgatggcatgtccgtacattaggataccaggaaacaatggaaatgatctaactgcagtgttgtaccatattattcgtgtatttcataaacatgaaattagtcagatctaaagcaatgcttaccctgtaattccatgtacataaactccaaaaccaggtaaaagggcattcgacctaaaacagcatcatgcttaggaacagcacaggctttgggattaaagggtgaccatctcgagaagtgatggattcctctcagagggagggggagtgggaatgaacttctggggacaactggggacaccatcggcgtcctatttcttccctagatgacggcgatgttggtgtgctcttgtgagtgctcagtgggctgtttgtttcatgaactttcctatacgcactgtattttgcaaatttaaacaaactcataaggaccacaagatgagctggcaatgcaatccactgactgtgctgcccccttcccttccccacccagagctgctggaggcatatgactcagggatgactgagtctgtgcgtggggacaaagcactggaatcccccaaagcataacactttaattgtttgccagcaaacatcaagaagcaagctgaccccttggtgtaaactacagaagttggcagtttcatcgtaaaggtaaactgtgattttttatttttgcttcatatatgtgtatgcacacatatatgttaaatatgcctacacatgcatgcatgtgaggacagaggttaacttacgctgttcccttctattgctgtttatattatatactgttattgttactactactactactattattattttgagaccaagtctgtcacagtccctgcagcttatctattcagcgagatggctggccagaaagccctcagatccatttgtctctatctcctcagtgctgggattacaagtacaagccactgtgcctggcttttcacacgggtgctgggggatacaaacttatgcctgtgcagcaggcattttgtctatagaatcatctccccagccctttctgcttctcttgataaacaaaggcttagttattttatcttcaaagaaactttgagatgaatattcactttctggaaagtaggctcatatgtagaaaggaaggttagaagcactacgtggcccaaagcaggctcagaagaagtgataaagacaattgcacgccaggcaggtgctcttttttggtgctgccgagtaaccagtctcatggccttgcacattctgggtgggcaatctgcctcctgagttacttctcccggccaagaacagggttcaaaggcagttctcacagactgatgactgacagagcctctctacttacagacagaagacccagggcaagcctctcaaggagtacctgaggcacagctggagaatcacctacaagttcaatcaatttagattccagcctgcagtatgcttggggcgtggtgcctggaaatgtgcattttttcatgccgctgggacaatcaaaggctaagatgaactgtctgagaagaaacccaagaccagtgcaggtgaccaaggagacaaaagacattggtcagaacaaaaaatgctggctgtgttaatgatcacagcagctgtgttagccaggtgaaattgaactctaaaatgaacaggtttgcaccacggacaaggccttcgctttgcagatccagtaggggctctgagggagtctctattgctgctaatgggactcagaaaatggggcctggggagtgtgggtcaacttcaaatcactccatactgggtacacagcgatgggtttgaaaggacatccctgggaaaaagtcctgcatttttcataattaaccaacctaattctggggtgttacaagtgtgagcttatgaagaaacactgctttctggggggatttccacagtcaaccaggtgttcaaggtcactacctgtcatcgtgtgacctttccacatgagctgatctgagcacatgtgatgctgtgactctcaattgacctcattaattctgtgatttaaagccactctccaccccatcccagctccacttgcagggtgggaaggcattgatcatagacaaaagaacacaagaacgtgggcagagcaggttaaggagccatgtggccctgatggagtcttcccctctgcgctggcagggcatgatgatgagactggtaaacccttgcctatggctatctggctgtcatctcgacacaagggtaagcgatcgttccgccactcatctttactagatcagccccagtccgacctaaccttatttcttctagaatttcttttttccctttcaagtcatgtctacatttaagataagaatttcttcaagaacaaaagccaaacttgcatgaaaatgacaggggatagtgcatgggcaatggtgacttctgtcagcatcagcaagagtgagacttggcagtggccttggggacaggcaggggtgtccttctgcacgctcctaccttagatgatggaaacacgagtgcatcttaggggaagatgtggaaatactccagttccataactcatgtctaaagcaacatgcaaggaattttaggtgatagaaaacgcacctgagaagaaaaggacgctaaataaaacatttttagggcttccatctgtttcagtgaagctcctggaggtggaagacagctcagcttaatatatgagtagccataaaaaggaataagactcccctgcttttgaaaaatgcctgcaccccacactctcgatgaataaaggggccggctgccaactctactgccagctttagcttgtgagtcaagttggatctttcaattaaaaatttataatgtaataataatacttaaactcacatcgcacccttcccccaggaagctgaaagaatcttcttaatgtcaaattcttcatcttttatagcaatcctggtcaggcctatgggagctgaaatattctagtaagtgttttttaaaaaaacgtgcttcatgaatgaattatttcccttttctttttggcatgctgcaaggaacttggacaaagaagggttaaacatgcagtcatagcaagctgggctcttcctgggaacatctttcctacattctatggaaatgtagctatgaccaggcaaccaagtaacggggacatggagtagaaagtacaaaagggagggattccgggcttcgccctgggcctgcctgtggagcttccagaaatgcccctgtgctgtgtgagagtacctcctccagatggaaacatcaagccaatgaaacttccgtgtacccgggttacaaaaactggagttccttcgaatggtccccagctctgttggttttgtttgttgtttgtttttgttcgtgaagctctccaggtaatctgggaggtagcccggggtgcacacctccagacagagcacaggactggaagtcactgggaccgtggcccatccactcccagcttgcttgctgggcacagtgtataactaactcacctatgctcgcacaggcctctgtctgacaaactggcaatctgatcacaagaatggtctccaagggactctgctaaccactacaggatgtaagctctcttccctcacacgaaactgtagaccattacatccccgacattcctgagtaaggagctcttggaacttctaaaggagacaatcacctgggatgtttctggttttcttttttaagaatacagactccttggccctgcccctagctctcgtaagggaggtctcatgggtatttacaacaggttctgagccagggcttcttggtcacactttagaagccagtactctgtaggaaccagtacttaccaaggatgctgacaggatgaggccttcctaaggggtgtggccattaacatgtctatcatccctacctccagtggccaggtggacagagtgagctgagtgtcctggaaggcacagagctgatcatggtagtcagcatccagcatccattgaagaaaatactgtgtattcagcacccactgaagagaacacagtgaatccaggacagcacctggccattgaagagcacactatgtgtctaacacagcacctggtctacataggacacacctccttacaacagcgcagtctccttgggggaaaggacagcaaaggcactgcatcagaacagacctatgagccagagatgggcccagtgcaggagtatgtaagggatactgctttgtgtctagtgactgggggtggaggtatattctggactgatggctgtctgtcattgttcatccttgtaaacattcccaaagtacacagtctggaattggtaacttcttccacaaccctacagatagcccaaacccaactgaactcacattcttaattgtggcaaagaatgataaggtgtgtgctaaggtaaccagaggtacagagggatggcatgctctgagtgagagactccaagtggctggaaccactttgcacacgaaccccaaacattagtcaaagaggccacagcaaagctagtactaccccaaagagctcagtgtgactattcacagagacacttaagagaacaccaatcacccccagaccacctgtggaaggctgcggggagcctcagaagcaggcagctgcagaaggccactgcccctgtctaacaaggatacagaggaagcaggagttgcccaaaccctgggttcccctttcacacttgagggatgagagctggctactcagatatgcagacagtggacatcagcagcatgtcaacacatctgcaaggtgtgacagcatgccacctgcttccagactgagagattccctgcctttgaaggcgctggaacaggaatgaggttgctctctgaggaacacagctctggaggagctggagaaatagcgcagcaccaaggactcttgcaaaggacccaggttggcttcccagaaccacacagtgtctcacagtcactcatctgtaactcaagttccagaaggtctgacctttcttcctacctcacagggcactgcacacataggatgcacagatggactagacatatatgaagtcccaccacaaaataattttaaaaattttctcagcgtcacacacttccctccatacagtggcccccattgtcaccttgagctttgttcttgaaatagcagtgaaggttgttttgggtgggaggctatggtgatgctgggggtagggggttctgggtaggcagtactttgggattgcatctcctgtgtggtttaaacaatgttttcctactcctcttcagctgtgaggaactgactggtcaacaggagagaaatcgctgtctggaaaagccttcctctcagacaggtcacctgaaacaaggggcactctgtggagggacatggaaggtctcctaatagcatcgtgttgggtttaagaggagtgccactgtcctcataaaccatctgggcacctgctagggaggacacactagaacatgctgtccaagctgtctgccagagctgggggactccaggttcatgagcatactgattttcttaccatgtatttatcagaaactgacatgcaatgtgatggccaaggaggccatggctgttctccaaaagctcaaggaagttggatggggaggggatggaaagtcccccttcccccactgaggagaacttgctgaggaagaattcagatactaatttcatggaactataagcttgcagtgctcaggtctctacttcccaaagctgctactccagataggggcatgtaaaggagaacagaaatccatgtgccccctcgcctgtgttgactacacccaaagattttctgaggacaccccaaacccacccagatgatggataacgttcctgctacgtagatctgactttagaagcctcataaacacccttcctagggctgagacaacaaaaggacttcggggctatgcagtgctggctcacggtctaagggaggcttgaaaacgcaggaactaactggctgcaactgatgatgtagttctctgctggaataatcaacgtgtaagggccaagtgtgccctgtagcccagcagcaggagctgcttcatcgaggacatatttctagtaatgctggccatcaacagacctggcaagacagactcggagcttcctccctttccctgtccatttgttcatagcgtagtttctggggtattttacttttaaaatatacctctggaactttcaatccttctgcctcagcctaaggcatgcacaccaaagtgagagtcagctgtctgtctgtccctgtcttgacacttgtgttcgtccagtgtctagaaaatccaattctcagaaggctaattttatttcaccccttcttcacaggaaaggctgtgacccccaggaaagtgccccagttagacctatctgggtggttttgccaaagccgaggcccagctgacatggctagcaccctgacatcacaggtctataatgctgtcccaaccagagtactctcagtctttggccagttccagaatttccaggccactgggtgctttcacccaggctccaggtcccgaaggcctggtgatcactggatgatggcacagagaaaacatccatacttcttagtgggagattcattcggatgccagaaagaacccatttcctgtaacatcagccatgcaggccctggctgacaccgaccttccctgagacaagtagtgtagactgggaggtggggaaagagccagtgcaccttagggaactgtgtaaagaggtggggatccaagggactgcccgagaggacttttacctagtttgttgtacagctcattgcgtcaacacttctgcagaacacagcacagctggtgggtgggcaccaggagtcaaggaggcttgacagtttagagtctgcttctcagcccagatgtggtggtgcacgtttgtgctcccagcacttccggggtggaggcaggaggatcagaagttcaaggctatccttggctacacagcaaattccaggccagcctgggatacagtagaccctgtctcaaacaaacaaatgtttgcttctcggacagagctggcaagcagggtggaggactcagagagcagtggcggggtgggcggggcacagtgatgagctccccccaccccaggcaggccagatctggcccatctgtcgctaaacccgaaaggaaagccagggaactctttccttctcagaggctcggtgtttctgtctgccaaacagtgcttaaattaggagacccccatgagtccccccaactccaacttggattgtgtcacttgctgtcacaatgtgctgctcttatgcctgattagagtgggctttttcgacacgataaaggtcagtcacagccctgtggagggaaagcatcccagctcagtatgacagggcaggtagaaaccatgtttacactgcaggtagaagcggtgtttacactgcaaatgtggaagcagagataaatgtctagaacagcaaactcacaaagtacattatttgggagaataggcactctacctaccagcccctctttcccactcactccctgctctctgaagccctctttctgcctggacacacggactggctgacctaaaataaaatacagatgctgttccacatccagaccgactttgaggaagagaacccctacagagctgaggggtttcacttctgtctcactgtgtcctctggggccccagaacagctctccacaactgtgagccctgaagatggagatgctgctatagttgcccttagggctgtccttcagcaaggctgtttctccacctcttctgtcttgctggctttcagcagagctgaagcaatccctacggttcccataacattaggactaccttcagttctgttactttctcataagctgtgtgaccctgaggaagtgagtgagccttcctgagtctcagccacccaaacagaaaatgagaacataaatctcatctcatcggctagttgtgcctgccaaagagtgagtctgaaataaaccatcattatctccattgcaaaactcagccttcctgcaagggcagcaaattaatccgccagctcttaataaccatccagcacaaatgtgaagccctcagctacagttatttacaaagcaggaaaaacaatctccatggtatagaccccacactccaccttccctatttgctgttcagaataaagggccagggagataactcagaggtagagagctaacctggcgtacctgaggccctgtgctcagttcctggaaccaatcaataaatcaataaataaagaacaccaaagacatcaataaatgaccttttccaccattgaggagcaacagccacctctgcactcaaacttcccaaagatcagtggtgccaccactaagttcaaataaacataccactatccctaagccggcagtctgtgcttccaagctttcgaaaacacagttgaacgagcaacaccatgaccagaaacagatctggaccgggatttagagtcaaggtctgacttcaggtggtaggataggagtgcccacacttgatgctgtgccgactgctcaacacctgcaattatctccacagcacacagggaggcactcactttaaaggtgctaaactgctttggttttgccccaagaagatgaaacaagagaaggccttcattgctgggcaacattctgtgtccttattctcctttactttgttatctcacgctcctgggcacagggcttctcaggccacgagcttcagcagggtgtgcagacatgagccaggtaaacctctggttcaatagaattttacagagagcacagctcacataggatccgcgcaagaggaaatggtgaatttattagtgaggactttaagggcaagacaccactcttgctcaccctttgcaatttccataagaaaaagtgcttgtcagattaaatcagcttgaaagtttcataaggcagggctggagagacggctcagcgggtaagagcacacactgctcatgaaggacctgagttctgttccctgcacccatgttggagggttggcctgtagctccagctccagggggtccagcacctccggcctccacaggcacctgctctcacgtatgtgtctcatccacagacacatatgcacaccggtaattttttttttaagtttcattaaggaagtacacattattacatcacagtgaccctttacatcttatcataaaatcttcctcctcaaataacctcaataacgaagagaaatggaagccggctcctaacgagctcaaacattagcagagcagaaacagggcaggcccgcacctcctgtaggctataggtttgagttaatttccaatctgtgcctattccaacttcagcctcgccgatcctgggagagtcataatcaatctcttagcactccaattaattaaacaattcatttttcataactctaaacattgtctacagagcaaaaaataaaacaaagcaaaatgaaacaagagagcatgagagagtgttgcagccagcagacgtaggcgagctgccagaagccagggagcattctgcatcagcaatagattcaggggtcactgctagaaaggaccgtctgccgtgtcaaccagttctcctggtcgtagctccttcttgaatgagtgacaccaaacaccaggtgtagaagcagtagctgatttgatcatgggtcacgtcccaccgacctctgcataaaaatgtttcctgcactcttcaccgagtaccacggcatgagtgccaagtaccactcttcaccgagtaccacggcatggcagcctgatatcaaagtgccctgtgtgatctgagtattctgttgcaccagccaaaatggtgctaaactggatggtaacggtggtaactggcagagacagaggaccatgcaaacccgtcttatagactagaccagccctgggacagacgcctcccaagcatttaccgccctcaccctaccgagagtcgcatccctggcccccacagaggggcaggccctttaccttcttgtacgcagaccgctttgtcacttgggacccagcccaggctcccattaaaaaatctcatacacaatctctttgaagagcccttcagcctgaatccgtcttggcagttaaatcgggctgcgtcattttccaaaaaaactccttcactgggggtcctgaagccattctgcggaacgcctggatcatcacacacgtcaacgtcatcgagccctgcattgacaaagagagaaagtgccttgaatacttctccaggaactgtattttgtgccttgggccactccaaccttaggaacaaaattaagagtctaaacctgttagcttgcatcccgttggttaggagaggccaaggataaggaagccgcatgcctgcatcatgtcccaaatgcgtcctcagtggggagaggcgggaatgcctgagcgctgaacagacatctggtataaagtaaggaaagccaacccacaagtcctcactgagcaggtgttgggaaccagtatgcgtaactccatggagctggggatggtgtgcccatcttcaactcccggtacagcctgttggtaccatttctcagatttagagggcagcacacagtcctggggctcctggaaactcacctgcttccagatgctgccaggatgctggactcatgaggtagccactccttttagtaccctgtattgctaaaggtcctcagctgtcagtgacacccctcaccctgtgtgattgtgtgagactcacactccctccctgctggccttcaaggccactgtgctaaaagcctgagaagcacagcagtgtcagcatgtccaaaactcactgtcagggctccctctgtgcagagatgatgagagacggtggagggaggggacaagtaagaaggaagacaaaggtaggggcagcatccccacttcttctccttaagtatgagcaagtgagatactacatcaaagcaacaagatactgtccaaaagtcctgtcctgaagggggtgctggaaagttgtcacgagattgcttcaaatttgcacatttaggggacttcaggtcatcaggtgcttcttgggtaatggcatcatgacttccttcggtctggaaggacgcacattcccatggtgggtcctctgaaaaggccattctgatggagtcagcctttctctaatcctatcagaatggggtacatgtgtgacagagggagccacagaagggcatgaggagtgtattatcccagagggtggggaagcctctggaaggcctccagctgagtcctggggacaccccaagccagaaagggagatgagcatcatgggtacaggtcaagagcatccgaagctaaagacagaggacactgtgaccactacctggacattgtaagggacaagacgaaacctgtctgctgatgtctcaagagggaagagtggcagtaagtgtggccttctctctcatgaggtctggtgtgaacagaacacaggggagtagctaccctggaaagagggttaaggcagagttttactattgttgtagtaaaatgttaagataaagccagtcacagtggctggagcctgtaatcccagcactctagaggctaagcaggggagattactgtgagcttgaggccagcctgagttacatagagagttctaggtcagcctgatacacagtaagaggctgcccttactgaaaaaaaaaattaaacaacggagatctaagaatcttcacacaacaaagaaacacagtgaagaatagaaagctgtagctgggggtggctgagggggacattccagtaagctgctgctacccagatacggcaggggagacacctaaacccaggggcacaggggatacttaccttccactgaaacagaggggaggtcttgccacacccttgactgagggaaggacatttcttatagttcaagcattctcaggatacacacaggaagcccctcttcccatcagggtagcctgggttcacccctcaaggttttcttccctgtgaccagactgctagactacctatctgtacccttgtctggtctgtgaaagcctaagcaggagacttcatcttcctcatctcctcagcatccagcagcactgtgtgttgtgtgtggtgaccatttgcacaagtacatcagtgaaagatgactggccgggtagatggacagatgggtggttagatgtgtgcacgggcaaaaggacgggtgggtacatgaataagtaggtggatggtcaaccgatggatgggtgggtagatgtgtgaatggctgagtagatggagaggtgactaggtctgtgatggataggtaggtgtgtagatggacaaacacgtgagtggacaggtagatagatgaatgggcagatgggtaaagggtggtatgaatggcgggtagaattttgtgaggaactattcctctaagagccattagaaaaccatcccttcccaccaccaagcaggaccaccagtggccaggagctcatgcatgtcacagacaggtgtgacaccctttcctgaatcgctctctttcactttcccatagacaatgatccttaaccttcttgcttgcatattttttcttttcaggaaacactgtagctctggctgacctcaaacccacagagatttgcctgcttctgcctcctgagtgctgggattaaaggtgtgcaccagctccttagttttcttcaaccccaatgttttagggctcttcttcaacacagggacagggcaggtccaggttgcgtcttgcctgggcatctgtgctcccctaatacatggtttttagtctgtcacccttgctaccaagcatcggcaacactgactttggagttcctccagctggccacaccctgtctttggcgataaagctgttctcttccagagaaggcaagactagtcaagggagggctgaagatccatcagacaagacaacctaatctatcaggaaaatcactgggctaatcaaaaaattatgagagcttcatgaaaattagaatgggaagatgagagaccttccccacgagcaacattctttcttactccttctaagtcacagccctggcaggtctctgcttccatttagtcatagatatcatggccgtgttcctaagcctggtgtggagctgacaatctgcagtgttgctggccagggatccagccctgggcacagaagggacgagcagtgaaaagagccatcagaagtcaggatggtgcaagaagaaaatattcttcatttggacaactaatcccattgagcaagatagtaattttctaggcctgctagatctcagagtctttgtttcaaattatcccttggtggatcaattgccagtccaggccatttttctgcagagccctctcttcatgtccttccaagatggtgatgatcagaccatctgataacaggcccattaaggagtgggctgatgtaggtattaggaggcgtggaaaataacttgtgtacaggcctgctcaaatcacctctcaagaatctgctttcttaaaacccaacacacctccttcccatctgtccaaattctgctaatgctttggaactaagtgatcacagcctagagggaagagtgaattctcagaatggtttctgagatgtttgctcctgggaggagttggaggagaaggagggggagtactcatttcaaacagtcctcagcagcagccacccctggctgttcctactacagtcagtctagaatagagtgtatgtacttaagacatgctcaggtgaaatcttgactgggttataagtacccagatgttagtccctgtgtacagggattgctgtgtcccttttctgggtgatttcaacctgagactggagaccaagcagaatggtgtaccctcttagtgtgggcagtctctttcagtgttacaggcctggacagaacaaagacaggaataggaaagtgtttattgtccatagctgctgtcttcaagctggaacactgatcctatgcttttggatcagaactcagctcaggactttcacccctggctctcctgggcctcaaacttctgtattttgactagaactgaagcactgattctgctgggtgtgtaggagacacagatgataggtgggtgggtggatggattgctgggtgggtagatgaatagatgggtaaatggatgacgggtgaatgaatggacacacagatttctattggttctgtttttctgcagaacccagactcatacaggctttcaaagttctcaggcacttccaacttgtgcataacagggatgccaaccaccctgcttacagaggccacttctctcagacccgtgagttcttctctcagatccttgagttcttctctcagatccttgagttcacatatacaactgactcactgagtggggttgatgtctgaaccttggggtctggacaacccagctggatagccccagactgtggtcccctagctagcctgtggtccccaccctagtggtcctctctctcgcctctgatgcctacagccctgggtgctctgagcctgtacctcccgctcgggcatcagcatctcatttccagtgggcgtttcctcttgtgaacccagatcaagtcaaaaacacagctgtaatttggactctggtccccgtaagaagccaggattccttatttttcttttctctaaacccaaatccacctgtgtaacagggattgggagcgcccttgtcttcccatacaaagaaatgcatcaggccctcggtctcatgatgaggtcttgacacttctggcttggttacttctgagactgcagaaaccttgctgccagttctactgtgaacaacataagaagtctttgaaagggatcataaaaaacgaaagaggtgtgaaaagcaatcttttgggctattacagctgaaaagtcatattctagaaaggaagggtgtatcaaatgcagccaaatcaatttagagccagggctgggtttccatttctttgtaaactgctctatgggtctataggggaagaaacaggatatagacacaaaaattgattttgtatgcatttctttagtaagagggtactgggcaagagagaaggagccatctctgcaaacgtttaaacagatttctttgcaggtattaaataaaactaagagcaattcccaagccttgctcccacccagagcacttactgtagactcagttaaccttcaaatcactgacaaggtcactgtggttaaggggtgtgaggctaagggattggtgcagtcatcccagtgactaagatggaacccaaacccgaggcttctgagtcagtctggaccagtcctcctgacactaacagtgtcatctctgcttggctttttcctatcaaatttttgtagtggcatcttgttctgccggtggaacttcctttagcctgctttcaaattttagtttgcaaatggctcaaatcttgtgacaatctcaactcgtagatgttcgcaaagcctgtatattaagacgatggtgctgggcaaagagcaacactgggttgtgtgatgtaccacacaattctcacagttttccctaggtgaccctttattaccccatctcagtgggagcaggcggggaacctgacttgtcacctgagacatctaagaatccagaaagtgacccatcaaacatctccaggccacagcaggggtccacagtctcctgatgacctcagtttcccctacctccaaactcccacgctctcagaacaacctggacttacttttctaagtgaacacatgtattgacatcctgtcttatccaggataagatcaaagtccagaagccacttgagctggtgtgtgcctacaccacgggatccacaaggaaagaagagagcaaggcaacatggaagagagagcgttaagcgtcagtcaccaagctcatgaaggggattctctcatgatgatatttaaaacccaagacactcctgggcatgggccggctgctaacacaggggcacctgggagcccaatctccagccaccctgccctggatgacagatcaaggctacccctgccctgccctccctgacagcccattacagatcccggctacacttgaaggcctgagtccacacacagacagttggaggtttcccctgaggcagactccagagaggctctccatgaccaggaagtctgtcttgagccatggccagattctaacatctgggggtctgccttctccagcatcaggtagcccgaatctgaatccattccactgaggacctgggaccaagccagtctactgcagagacctggggagacctcaccaagaagaggaggagttcccaggagcagctcctgacagacagggtaggagaccccacatagttagaaagacaagtgggaagatgtggcttgcttgactcttttgaacacatttccacgataagattattaggtgcttcttggcctcctgtggtccaggacagccaatttccacgtttggcaaaatttcagctttgtttttaaaaagaaaaaagaagggagaagggaatttaaaaaaaaaaaaaaccagacacaaggaaaagctatcacctgtttatattattttttctatagacagacaatgctgtgtggtaatatattgttgatgatctaataaagcaactaaagatcaaaatgcaaagccagccacagagccaggcagtggggacacacacctttgattcccacacagccacactatagtcagccacagagccaggcagtggtgacacacaactttgattcccacacagccacactatagtcaaccacagagccaggcagtggtgacacacacctttgattcccacacagccacactatagtcagccacagagccaggcagtggtgacacacacctttgattcccacacagccacactagtcagccacagagccaggcagtggtgacacacacctttgattcccacacagccacactatagtcagccacagagccaggcagtggtgacacacacctttgattcccacacagccacactagtcagccacagagccaggcagtggggacacacacctttgattcccacacagccatacttgtcagccatagaggccaggtggtggtgatacacacttttaatcccagcatcaggagacagaggcagatggatctctattggttcaaggccacactgaactacatgaaattggtccggtctaaaagagaaacagctcactcaaaggtgatctcagtgcttgggatcacatgcctttcatcccagcactagggaggtggagacaggagtgatatggctaggcagagagaggaatagaaggcgggaggagacaggaagaactggaggaactgcagtctgaggcctggtggagagcagcgcagtctggattgcactctgaggattcatgcagacaggaccacctttcttggtctgaggtggaggtaagagctagtggctggctgctttgcttctctgatcttcagcttgaagcttgaaccccaatatcagtctgggtttttattattcgtgtttcagtgctgggtggaggagagatgggagcttgggggcagccattcgaccaacctcaggagcagaagtttgggggcactctcgctcctgttttttgttttgtttttcttttggggggtcggggtcggggtctatctatataatgctgcaatccttactaggcaaggaggtctatcaccaagatgcatccctatggtcattctttctctttacttgacacaagatcctgctgagtgacctgagttggccttatactcacttggcagcccagtcaggcctgatgtgatcctcctgcctcagcccctccagaagggatcagagaccttcattccaggcttggctacagccagcactcttcagaaataaagtagaatggacaggaggggacacagttcctcctacccgggagtgaagatggctttgggtggcttttcattgcatctgtacaagcattctttcttgcaaggctatctatattgcttttggaggctgcaaccagaaacatagcttctgctaccacagctgcagcaggatagtgacggcatgttaactcgaaatgatgcagctcgcaggtaagggtaaaggttgcagagtgagaatacacgctttgaatcctagctctgtgggttttctagctgtgtaagcttgggtaagtttcttaacctctctgtgtctttagcttcttcctatataagggaagtattgtaagaaaagtctctactttcccactactgtcaacttttactgagatataaatacatagaagacagtgattggcagatgatagggtcacagtgcaagctgctatgttgtcaacatgcagcaagttcctacagaggaaacggcacccaccgctcttcacagaaccacctcaagataagcctactcccctccctccctcccctcaccctcctgccccctccctccctccctctcgctctgctccatctctctcgtctgtctccctcctccctccctctgtctctccctccctctctctgtctctcttcctctccctccctccctccctccctccatctgtctctgtctgtttgtctgtctgcctgcctgtctctctctctctctccctccctctctctgtctctgtctctgtctctctctctctgtctctgtctctttggtttttcgaaacaaggtttctctgtattgttttggaagctgtcctggaactcactctgtagaccaggctggcctcgaactcacagagatctgtctgcctctacctcccgagtgctgggattaaagaagtgcaccaccaacgcccggctacctaccctttctcttaactgaccctggtgaacatgactgttgcacttgaacaatagaaacctacaaatagagtccttcccttggccaaagcatcaagctatggaaattttcagggcaacacacagacctccccggggactgaaccagggttctttcagaacacgacctggagagggaacaccaaggccagcagcattcagtgcccagagggccatggccttgtttgcagagacagtaaccaggtcctgtggaagacagccagtggtccctctggggtaagcagtctgcttccaaaacaattcctgatttgggcacaagacaccagtgaggcaaacagaatccaaaaccaaaccaaatacacaaacaccaagatcctggtatgtaaacagcaggagcttagagtgcaagaagatggggctagggacagagtttccattgggagataacacagtggccaaacttcagtgaaaaaggaactcaagcttcagcaaaggagacgggggggggggtcctacactcattttcctgcctgtgagcctggcttggtcatcccgtaattcagtgtgctctctgttacacacttacagggtactggggggggggggcagtgactcctgccatttgttggtccaaacaaaattatttatttatttctgaaaaatcagtaccccttgagaagcactgcaaaggcactggagagaccctggctagttactatagtaatacttctgccaccccaggagcatgacatggctatttattttagcagactttcactaaccagacagcacttaaacctggctttcggaaggcgacaatgagtattgggatggaaggctcatcttcatgggttgaaagctcaacatctggattgcatttctcagaaaccacatgtaatgccccacgagtgagcacgtgtgaggcatatctggatgctaatcaagttaggtaacatttccccagaacagtggggaggttttaatgtttcgagaaatatccagagatgaatagaaagtctgctatgtctgagcaagtgtaaacatcgcaaaaataagtcttaatggcataatttagacttgattaaaatggagaaagaccacagatgtgggtgtcagagccatccccgtttgatgccagaactgatatttccccccttttgatttaattcgctttgattacccaattattcctaagtcttttcactcagtttccgttccaataaaaccaatcacaaagctaactcataatgcgattttcactgcagtctcctgatactgctccatgagagctcagccagcaatgcaacagagtcactccagaccatgccaggccagcacagaacagcagcatctgcccacattcaaagggatcactgagtaccagtcacaaggacagccaggcgttctgtgtgccggagatggcagggacatgttgtagctgatataaattgtagaatgagttgtgcagacatctaaatgatgtgtgatagagttttagacaatggtttgctatggttaaagatgtatcttttttatttcctaaataaatgattactgagaaaaatgtagattgcctgtctagctagctcttgactttgggtgtgtaacttggtagttcctagttttaatattttattgagacaagatctcacgtagctcggattggtcttaaacgtcctatgcagcccaggatgaccttgaacttgtggccctcttttctctgtctcccaagtactatgatgataggtgtgtactattaagcctgactgatgaggtcctggtgatcatatcatgactcctgtgtgctagtgagcactctaccagaggtgccacagccttccagtctcttcttgacaaatggggggtgtccttctgaacatatgtttctcttactggttgatgaataaaacattgattggccagtagccacgcaggtagtataggcagagctccagaccaagagaattctgggtagaggaagcagagagaagccgtcagagagactccatgtagccactgaaggagtaacaggactgggtattctccactaagcaaaaaccatgtggaaatacttaaattaatagaaatgggttagtaattaagaggcagctagccaataggaagcctgagccactgtctaaacatataaatatgtttataattcatataagtctctctgcgtttatttggggctaaatggctgcaggaccaggtgggaaagaaactccatctacaaatggcaccctcaatgtggaagaagaatttccacgtaaaatctgacaaaagcttaaaaagggattctaaacacaaaagaacagagacaagcatggcttcttggtagcagcattttctcaggtggactctgtttgctagaggcaagcaggggctcttggctcctttaagagaggcttcctgactcagtattagcaaaaagcacacaaggctcctttcacacaccctgctaccaagcaattaagtggtgtttgtgagcagcagatggcatgcttcttggtggtagcatgtacctggaaactctgcagagttgtgccaataagcatggctcccaccagtactcagccataaagctactctcagaaagccaaggaatagggtggggccagacaccgctttaattttagctatggcatttagcagataagactcatatggtcagaaaaagatatatgttaaagatagagtcagagaaacaaaacctctaaatggtaaacagtgtttaaaaatatacataagtttgggataaagtggttaaaaataaatagtgttaaaaaaagaaatagagtggctaggtgtagtggtgcatgcctttaatcccagcactgaggaggcagaggcaggcagatatctgtgatttcaaggtcagcctgttctacagagtgagttccaggacaggcaaaaacacacagagaaaccctgtctcaaaaaacaaaaataaataaataaaaataaataaatagagtaataaaacaaggccacataaagatggagaatacggagagtctggatactgtatgctattgtgttgtctttgaattgtttgattgctgaggaaagagcaacagctgctaatagacatttgactataaatgctgcttgattaatccaacctatatattttgaaagtgccttgacttcaaattttatgtctaaggacatgttactttggaaaagaagttctgtttttgtttctacagaaaatgaaaagctgtaaattccttccaggttaatatagtttgatcaagcaagaccccctgatgcagtgttccaggtgatccaacatccaaaacagctgagaagatgcagccccacagactgctacagtcagtatttgaccaggtttctgggttttctcaggatccctttggaattaacagtggccccaaacagcaagaagcagtttggagagaactatgtccacatttctgaatattgtttataaatgtttgttttcatttaaatgaggttggttataaatagttaatattcacagtcagtctctttctttaaagaaaaagggaatgtgatacagaagtgaatactttgcattggtatagattttggtttattaatacaactttaaagtcaattttgttatatgtatatttctactcttgtttaggtattatgtttatccagcttgtttaaaaatgtattgcataattaaatacacattacagatagtcacctataatagtcaaaacttacagtcatgttagttaggtttctagatacacagcaatatatttgagaaggacagatattcttcaaacctttcaaagacctatagactatggcatttaaaatggtttattgggtttttttcatgacagacacacaactgctcctggaaacaccaattacatcagagaggaagatggacattgaaaaaaactccatttggggtttgttttcttcctggctatactggccttctggacaaagaactgcccctacctcaaccgctgactttggtcaacctatccttactgggctagcaggagaaaaagagactgcagaaccttgccaagtgagggtaggacagtctttcaattgccctgcttctgagatgcctgtcagatactctaggccttagccaaagttggttgccctgacgttactgtgagaccttgggtgactggccaggcagcctgctgtttctgtcatttcttgcacctttaggaagtcacccacttgcacttcctgcttccccttaatatgttattttccttctcaggtctttgatgaggtttaagactagatatccacggctaataccctctcttatcttagatagagcatactaggtacacgacttagactttccagattaggacagcaatcagagtaatcgctgttatatgccattaccctgggactggacatgtagaatgtgtttattgtttaatgttgctcttgctagttgaaggtcttaatttgagtatgtttttccatttccttctcatggaatatacttggtatttgttattattgtatatagtttttgtttcaggcttaaaaccctcttctttagacaaaaggggaaatgtagtggcatcttgtcttgctagtgaacttgtggtagtggccacaccctttgggcatggtttcagattcatctgtgacccattataaggtagaggaagggttggctcttgctctcttgggttgtggagagcatcagaagggcagagattgaatcttctggagcaggaagaccctggcagttatttactcttaactgtgcaagtacttccctaataaacacctaattatcatttatcttgggtctggtggactcatttaaaccccaccttcaaacaggtaacaatttcccagactgtaagtgctcaaattagtggttctcaccttgtgggtcacaatcccttcctagggggtgggatcaaacaaccctttcacaggggtcacataagaccattagataacacagatatttacattacagtcacaacagtaggaaaactacagttatgaagtggaacaaaaataattttatgcttgggggggtcaccccaacatgaggaactgtattaaagggttgcagaatcaggaaggttgagaaccactagcttagaccaagatagccaggaagacaattcatgagaagttaaaaaaaagaaaaaaagaaagaaaagctagaatgtaatctttggctgcctgtggctgttttctgttgtttataaaattaaaaatttccatcttttttacatgcaacagctttcctagacaatactaaaacacttttcccacatgtacacagcttcacagtttacagagcgtttttacacacacggtcttgcttcatcctacggcatccccaagagatcacttcaacagtctgataccatcagctctcacagtcactacagaaaacccaactgttaactttcaagcagtctttttaactatgctccacccgcctcaatagttcattcacaaagtaccatctaagccagtatgtgagtttataatctctctacactctgaagtgcccttgggacacctgtgtgtgtgtgtgtgtgtgtgtgtgtgtgtgtgtgtgtgtgtgtgtgtgtgtgtgagtattgtgtatgtatgtgtgtgtggtgtatgtgtgtgtatgtggtgtgtgtatatatgtatgtgtgtgtatacgtgtgtgtgagtgtgtgtatgtatgtgtgtgagtgtatgtggtgtgtgcataaatgtgtgtttgagtgtgtgtgtatgtatgtgtttttgagtgtatgtgtatgtatgtgtgtatatgtatgtgagcgtgtatgtgtatgtgagtgtgtgagtgtatgtggggtgtacatatatgtgtgtgtgtgagtgtgcatgtgtgtgtatatgcgtgtgtgtgtgtgtgtgtgtgtgtgtgtgtgtgtatgtatgtgtgtgtatgtgtatgtatgtgagtgtgtgtgatgtatgtgtgtggggaggggcagtagaaatgttatttatttcctgcagtgagaatgaaatgggtgtgggaccagagctcaatgccccctccaggggcacactccagtgacctaactgcatgctaccaggtcctaccattcaggctcccgcgcagcaccccagcagcgccaggagctgggcgctgaacacatgtgcccttgagagacagtcaacatgcaaagtgcagcagcttgtgaaataaaaatggaaaagagagcacctagtgcagcgcatgcaagacagccgctctctctcagcacggtcagactgaccgtgaacctcagcacatgatgccaaagccacgagaagagggattctctttccctctccctccctctctctctttctccctctctctcttcttctccctccatccctgtctgtctttctcccccctcgctctctctgcctctccctctctccctcctccttctctctctgtctttctcctgctctctctctccccctctctccctctctgtctttctccctctctctctccctcccccttctctctctctgtctttctcccgctctctccctctctctgtctttctccctctctctctgtcccctctctcaccctttctctttttttatgtgtatgagtattctgcctgcaggaatatctgtgtacggtgtgcatgcctggaacctgaggaggcggtagagggtgttcccaggtgttgatctcctgaaagtggagttacaggccattgtgagctaccatgtaggggatgggaattgaacccaggtccactaggagagcaacaagtgttcttaaccacagagtcagttctgcccttactttgtttgcttttaggatggtaagttcaaggaaattcttccaccacctacacaaattgatcacaaaaatttacagagagcgccccgtcaccaacatatccttgctcttcgactcagtggctctggcttgaagtagcaatcattaggatgatgccccgaaatcagcatggcagcagctcttttattggaacatggagctgcaatttatttaaataatgtactctaagtaacaggttttatcgcctatctaccttttaggctatttaagtctttataaaaaaaaatattctgaaaactacacaataggcaagtaagtagattagaattaatccggagaactttctttattaaacaagacaaaacaaacaagacatacagatgaccatgtcagctcacacagctctgaggaagaaaggactacaacatggggacagatcctacatccatagctcttcactctctggggacagaagaacaagcatccattagacaaggcaacactctgcctgctgctgctgtgtatgacccgacctgaagccaccacaccctcagctactgccaggaagacagcagttatgcaataggggtgacgtggaaacagagggaaacagaaggccatccagctagaaggattcattcagagaggcttgttgagaatgtggctgttttttgactataaacaaactgagaatattatttttctgaggcataaaaagaattgtgtatctccctcttgtgacaaattctgccaaagtatcacagggtaagaaagttaaaaacaaagaaaaactaaacagaccttgttgcaacccatcaacagtggctcaaggtaaaaaccaaaataaagagagatgcagcacacaggtcattcctagcactttgaagatgtctgcaccacccctacagagctgcctccttcctcacgccccgtgtaccaagtgctgagcagcctgtctggccgactccagtggaatccactccagtggattccagtgtctggggaggcagccaggggccagcacagtgggagctgggcaaattagaaccatggggtttgtgtggggtcaattcaggggccacagcctggccccaaagcatcccagaactggggaaggggctataggaagcaatagcacgagggttgcctgagactctccggaagagcacagcccaacttgctggcatggattgtgtgtgattcagagaaatacaggaatgtcaagtttctcatggtctcttcccaaagcctcatttttgatttggatgtttgttgttaatagggagatacaaatgtagattctagaattcgtgggatctggactgaaggcattctccaggacactaactggttaactttgggacaagcttcatggtaccgagtgcagagctgactaaccttattctgtctttcataaaactctggtaactggtttccgagtgtgaccccccatggcttacagagtgtcacatcagctgcatgagagctccaacaatagctctggctcccgggatggttctgggatatgcccgtgtctaacaaggaggcctcacttacgatccacatatgatcaatggagttcatgctctaatgctgcctgttttacctttcactgagtcccatgacctgcaacgctatcccattccttagaccagacagctctgggcagtgcttttaaccacacaggccagtgaccacagaccgtgtaagagtcagcctcgggaactggtactgctcttcctacataagaacagccatggtgctggattgagccacagcctagaatgcacttcctgctattgtttttacaactggaaatccttgtgtgacatttcctatcacctccgttcccaaacacatgacataaattccccaggagcacctgttcaagaggtatcgagctgatataatagccaatgagccgttcatgggatacaacgttctgaaagcattcgatgtgtatttgaaaagcttagtgcaatttcctgtatttgtactggctacctcaaacaatacatcgcaggatttttaaattttacatttgttcactttatataaatattttatgtttacttatttaattttgtacatttgatagtgtatacacacacacacacacacactcacacacacacacacacacatacacacacacacacacacaccatgacacacaagtggaggtcagaggataacttgtagaagtcagttctttccttccaccatgtaggtcctggggactgaactcattcatgtctgagcttggtagaaagtattaacccatccagccatcttgttggcctagggtcttttttttaaatatggaaaaaaagatgcaacacctatgatgaataaagtgaatgctgacaggtgatttttctatttttatgcagctctgagttatccacactgtctacaatgaacagttacaatcaagaggcaaatgctatttttcgacgaactccacaacacaagactgttaaattgggggtgggtaagaaatgtgggagtcaaaagacacacacagtcttcaggaccccaaacgtgacaaagcagtcagttcctccagaggagtatagcagaggcccagggccactctggagggcattaaattctcagaggcaccagcaaataacataatgtccctttagtggctcccctaaatcatctccctctcgcagagccacactgtctctttgctgcccaggactctgaaggctgcagctatgggagaaaggctgtgacattcagagtgcagctgggtgctttatggcctcctccccacaagggtcgcctgcatgctgagaatgaatagtgctgggtggggaccaggggctcagagtggagcagcacagatggatttgagggagacggcagcctggtggggattgataatgaaccactgcacgctatctgaagccacttaatttcctaaacactgtgttataaatatgctgtcgtggagtctgccgagaatgcagataaatcagaaatggggagatgaaatacctctagttcctccaaacaaacatccttgcctatggtcttagccgaaattctacctggatttctgagaaagggcgatgatgctacaaatgacatcatgtgtccttttgggtagcctttgctgtggtaaagaggcttcactttaaataaataagtagataaataaataaataatgccactaaagggcactgaaccatcagtccttttttcagcagcttcactgcaaacaaacaaacaaacaaacaaatgccactaaagtgcaccatcagtcctttttacttgcagattttggtccagattcatggtggggatggtgtgtgtcagatgtgatggaggtagagagtgtttgtgagcggtcaaataccagaataaattagatgaacacgggggagaactgcaaacagattcctgtttgctcagaaatatactcaacctttctttattttttattttttgtaaaatagtgaaaaagaaagaaattccccaaacctctgacacagaaccagataaggaaacagaaggatgggcagggaggacacaggaaaaaataagacttgcaatgggtttctgtctgtctgtgtcgtcctctcgaaaggctgcagaacgtcacgccctagcattcagccgtatgctaatttgctgggagcaccattcatttcctaacttcatctcagatattagtcctggcacctccacctgtacggaattattaattagcagctaacagcgtgctcggccatcgtgggctctgtttgcagggctaatggctcagttcacgaatggttgctcaaaatattttaacccagccaatcagggcaaaaaaaaaaaaaaaaaaaaaaaaaaaaaaacgcatgactctgaaggacccggaccttgtggacccccacatccaacccctgagctgccgtgcaaatgagatcctggtaatctcaaagttcggtagaaagaaaatgaagtagctgctatttaattttttatggggcccacaatttgtctcattagctggcgaacaggatagactaggaactgaatgccgcccaggcctccattctacagggcacacagaacagggctggacacactcactcactacggcgctgggtgggggtgggggttgactggctggtgctggaaaaggagcacctagtttccaatctcagttgctaggccagtccatccccctgagacacatcaacctcagctaattacagaagcttccagagacttgttaatctaatctacgaaaaccagagacttggaattactactccaggggttgcaggcatggtgaggaccctcgtgtgcttagaaaattcagaaaggccactggaataccattgaaaacgaattgcactgaagctggggtcccagggcaccgagtctgtgtggactcaaagttatagccatgagggtgggctccctgtgcagggcttccaggaaaatgactccattctctctgtctctactcagtgaaccagtgaaggaacagctgagaaaatgggaagaaaaccaaaaagaagaagaaaaaagacaaccacttctaggacattttcaccttaggggcatgataatgtcgctgaagcaggggtttggggagctggctctggggcatggcagtgagaaccccttaatttgtagcaatttggctggaactactggtggcctgggaccccagagctatccagctggtgtctgaagttggggccttggcctgtagaatctgcaccaattgcaggtgtcacaaccacactgcaagccctggggaccaatggtgcaggagacaatgacagatgggaccagagatccagatcaggatttggatcagaacataggcttggagtctggcttcgccattgcttagatttgccacatcaggctggctactgaactcttttgtatttccctaagcccagtcccctgtctggcaagacaaagagcactgggcaaggggaatcaaagtcctaagtactcagggtgacaaaactgattttggcagagctggaagttgggtggatctagtcttggtttaagcttgtgtcgatgttgctgtggtccccaaaccagggggacaggtagatagtaaatgatgtagacagatctcaaaggttcacaaatgtttcagaaatctctttctgagcagagtatctggcacgttctttagcagctgagaactttctctcccagaacggtgggtatggtacttcacattctctactcatttggggaagaagctgagggagtggagaccaccgttatgttttcatttatgcaattccaggttaaaaaaaatcacttcacacacacacacacacacacacacacacacacacacaaacacgtgtgtgtgtgtgtgtgtgtgtgtgtgtgtgtgtgtgtgtatgtgtatgtctcctaaaaatacaacaaaagacttgagagaatagatctcattatgggggtggctgagccttaggaagaaattctgtgtttcatgaactagatgtcaatttaaagtgacccacccctggattaaagtcctgattgtgtagaaaggggatgctacactcacacagtctggcttgaaagcctgcaggttttccaaaggtctcagaacaatcagggatgattctatagcaacaggaagagaagaggactcggaggggctgagaagctctttcctaccctacagcctggggaaagaggctccaggtgttgagtcctgtgaccaaagcctggatggaagggtgtggaggtgagcagggtgttgagcatgggcagatatggcagagcttacaccaagagtgaccgcacagaagagaggaacccaagctaccttgcatgtaccaatgcaccaggaaacagtgaaagaggtgggaaaggacagagattttactccgatttatccagtaacttgtccccagcaggatgggcgcttctgggagaagggagggggaggacattggctccttcacacccttccagctacttccttgaacgtgacttaaagggtttccacctgcattagttttatcgttgcagtggcaaagtacctaccagaaccaaatttaaaaagcaagagtatatttcggctcaccgttcaaggtgctcacagtccaccatggtgggaaagccaagtcgggaaacagctgggaggctcccttcctccttatcatgctgccccagaccccagaccatagaatgacactgcccacgttcagaatgggtacttccatctcaatcaacacaggccagaaaatcacacacagatcttcccagaggcttgactcctcagtgagtctagaggaggtatttctgaacctgtgggtctcaacccctttgagggctgcgtatcagatatttatgattcataacagcaaaattacagttatgaagtagcagcaagataattgtatgaggaactgtactgaaaggttgcagcattaggaaggttgagaaccacttttctggagcctatcaagttgataatattaaccatcctaccacccagggtgggggataagagagatacagcactccagggtagtactggaactccttgcatgccctgttggctgcaactgaccagtcggcaacctgccctctccttgaaggtgagtctggtccagagttccttatacctccattcaaacagacttccggtaggtgtaggccatttctaccacaccaatgtcatactcagggtagaacaaaaccaaggcttggctgggactatgcacgctcagtttttaaaagtggcacaaacccccaagaactcatcactaaaggtcacaggccaggatcagaatgctggcccttatgactgcctccatctcccagtccacacatctccatctcttcatgtcttaaagcatagttgctggctggtcaaggaaaggaggaaggatctaaaacatggggatgcttccatgggcaggtgagggcttggtggagatgaagaaccagccagatcttgtaggggcagattaggcaggggtggggcgagtgaggaagagttcctagcctaaccaatagctcctattccatttctagtcccagaagtactttattattgttgtattctacaatcagtgtttctcacaaggccagaaggctaagtgctccagataaacatggctgaggctgcagagagggccacgtgtcacccagacctctttccagttggccttcttagtaccaggtcagagtgcacagccagccacacacctcccggtcagtgcccacctcccggtcggtgtctacctcctggtcagtacctacttgaggctgttagaagctataagatgttgaatgtaaaacatttagatccctcctggggacacacacatcaacacatactgaccattgtcgttggttagtgggggctctagagctcttctgtggagacttagttgagtttgtggatagcaggtacatttgtggctcagtgcttccctaacactctgttcctattacaaggcccaaggcctggatctcaccacattaatgggattattcaaacatgggccttttaatccaacaagacaagatgttctaaaccttttgggcgatgggtccctctggttgtacgtgaaccctcatggaaaccatgctttctaatgcatagcacagtggagacgcaccatgctgaaaagcagttatgaaaacagtcaggcagatctgtgacgtgcgatacgtgtgcatctttattaacacatccgcaaagacctactgtggcatccgagaattctctcttcattttaaactactgatcaatgaaatgatatttggaaatactgacaactgcaggacacatgaaagcaggtgacaggcccacagatgctcctaggatgactgcagtcaataccctaagaaagaaaatgctgattttggttacagataaatgagcataaaaaggtgacttcttgtctcagctcagctcacagccctttggggtcctatcgagaccttcctctatctagaatgcagtgtaagatccttgtacacggacaattcatccctgtaacttcagggttgggtgggactaagccccttgttttctctttaattaatgaatttagaatatcggtaccccagcctacaaacctgacaaggctcttctatgctagaagctgaaatctgtgtgacacagggtagaggtcacagtgccatcacgtgggagactagaagtacagatggctttgagggtgtgtgtagaagtgtgtacaggaaaagcaaggagcagaggattgcagtagaggggagtttttacagttcttcggaaaatgtctggtcatgaatccatctccctgacaagagcagattttcatgggcagagtccatgttttatttatgtttacgcaagtggaatggtattttgaaaatattaaacagatgcatctttcattcccttctaatcatgttccctgtagccttcacataattacagctgggcccttcccccaggaggaggagcatggcacaagggagtccacagaggaaggaggaggtgacagagaaaggctgccacctatccctaagaggcagaggagggagcaaccctgccgccctcacctttgggagatggctgctggcctcacttcatcaggactgaccctcaaaatgaggtgagggaaatgaaagacaggaaaggagggggaaggagagggagggggaggagcatggagagggagagggagagtagaaggggaggggggagaggtctggggatggctcagtgggaaaagactaggttaggggtgcaagcctgacaacacgagctcagttcccagaagccacaggaaaatcttgatgtagtggcgtgttcctgtgatcccatccctcctttgaagagactggagacagagaggagaatccactagaagtttgagggccagctagcttaagcatgctgagcaatagcagagagagaccctgcctcaaaaaaggtagacggtgggaagcaagtccccaagagttgtcctctgatttcctaacctgtgtttcagcttgtgcacacacgcgagcacatgtactctctctctctctctctctctctctctctctctctctctctctctctctctctctctctctttctctctctctctctcacacacacacacaccaccactaccaccaccaccaccaccaccaccaccaccaacaacaacaacaactgtgtgaaaagaaaaaaattaaagtctgaactaggaattaatttcccaaatatttactagaaaggctgagtttaactgtagcagtcggttgaaacacttgggggttttcatcatccgtgagcgcgtgcggcttcagcgtcacatgaaaatctgcgggcaaccaagagcacctttggccgactaaatgcagagtgtccctccacccttccgagccctgtgtgtgtctcactcacaatgtgcatgcctcagacttgtgtgaaggtaacgagcttgggtgcacagaaagcaagtgacacccagcagacagcaaggaaaatgggaccaaagtcacaaagactgaaaggcgggaggtgctagggtgagtagctgtacagaccaggctgctaggccatgtaggctgcaagaatcaccgtaccagggaccgttcataatgaagctcccaagtcaataagattttccttaggagtaggagctggggctggaggtggttcagcaggtagagtgaaaacatgaggactggagcttgtgctatagtagtcacataaaagccatatatggccccaaacccctgcatccccagaactagggggacagagacaggaggatccctgaagtccactgtagtcaatctagccagggtgctaagttcccggtgcagtgagagatcctgtcgtttaaaaagtaagatggagagtgatagagaagacatctgattttaatctctggcctctgtacgtacgtggccagaggtgtgtaccctctatacaggtacacacacttgtgtgctcatgcacagggcacacacgagtgagcaggagctgggtgcggcagcacacgggaggctgaggcaggaggttcttgagtttgggttatactaggctacacagtgggactccatctaaaacaacaaaacaaacaacccagaagaaagggaggggggaagaaaattcttttttttaaggactctcatccaaaatggttattttcacagtgtacctttgggatactttaaagctcagctaatgaagaattgacctccgaggaagctgccgcttttctagagctacaagatcaataatgcacagctgcattttgtctttctcccctgcaggcctgcccaagtacagacctccctctctctctctctctctccctctctctctctctccctccctcccccctctctctccaggacctgcctcacgtgaccctccaggacatccagctaggggacctcctctgcagggtcagacccctccacatcaacatgctgatgggaatctagggcccctatagaagagccagcaagtgtgaccccagcagggtccctgcttgcaaacacttcctcacatgccgccccacagtccaggatagtgtcctgagctcccttcttgtgtgtctctagcacaccttctctgccatgaagcttgcatgagccagtaactctttagccttcaactagccaagagtaaaaggaccccagatgtccaagctatgaatgatttctacagccaggcagacctggagcatccatttatgtgacctggctttagcattctttctttctgtgtcttctcccaaaagcaagaaaaccctttcatatgctaaggtttttacttgagaaaatgaacaaatgaattcaaaacaaaagaattcccaaatagcatcatcatttaatagaattttgtcacgaaggaaaaagttagaaaactatgacttgggtaggagagagggagagagggaggcaggaagggagggaggaaggcacgcagggagggagggagggagggagggaggcagacagacagacagacagacagagacagacagaggagatgtactctaactaaagtatactaaaggacaagagtggttactttgggaagttatggttaatctacaaagttctaaggcaagacaactaaaacctcagcaggcttcggtgatgcacacttcctctgtacccgactttatgacttcacacaaccccacagagaacaagagaaagtgaatttcctttcatatccttccagcaggactttgtggcctcaccacttggggccacgaggctgtaggaacttgcagagaacagtcccaggttctactgtggtgtttctgtactatgctagactactcacagttgccatcactcaaccaggggatgacagacacgaggagcccactgtcaggccacagacagccccatgcatttggaaacaggcatattcatacccagtcaataatacggagcagagctttcacctgcctggttttcttggatgggatgccatctacatgggcctgccatccagagttgctgtccaaagatccagtaaggtgttgtatttatatgtaagatctcctttgttaatgccctcaacatttgaaaagcacccagctaggtaaaataaaaatcttatttttaattttttggagatactaggaatggaagctaggtcctcaagcaagtgctctttcactaaactattcccctagttgatttttacttgttattttgagataggatcctgctaaggttgtcaatgctggccttgaacttactctgtattccaggttaggacttgaacttgctatcttccctccacagccttctgatagccaaggttgaggacttgtacggccagggttagctgaactaaatctccttgaggggacagtactgcctgtggcatccaagaaccccttgagcctctctaggtgacagaaaatcaatgaaagccgctgcctgtgttcaccgatcttctcccaagacacactgtatccccagatcctaacctcagggacatctgcagggctcaatggccacaggcacactaagatgactggctgcccaggtgctggcagctgtacttgggactgtttcctcttccctggccatcagccagctggctcctgaagatactctgtgttagccattgaggggcagatctgactcctgggtggggagtcccaactccagagaccacacaccaactgctggtccacaaggtaattttggcctggtgttggctagcccatctcactttgcacagcttagcaccaaggaaggaaccgctgggcaccatgttccatctcgaccacaaattctgagcggccccgcagttatcttctgctggtacccagcatgttccctttccaacacgttccctcatatcctgctcttctctgaggtgaatgcctcaaattcacagacttaccagtggatataaagaagagtgagacaggattttatgtgtgtttgtttactgtgtgctgctaggactcaaacccaggcccttgcacaggtcaggcaaattctccaccattgagctacatctccagtctgaggaatagctcaagctgtcctcgaactcataaccctccagtttaaacctcccaaatactgggattacaggtatgtgtccccatgtctggctcagaaagggtgttttatataaatcaatttgtatttaaactcagagagaaggcaggaactcacgtataggtaaaaatttcagagtatcaatgactgtcatcatttacctatctgatcctgttgtgggtcaatagtgtgcaaggatattactttaagatgtttgctctgacttcaaccctatgactccatataagaaagtatctctgcctttccttacaggctcacactccaggctcaacatcctctgcctgaaagctgtaactttccctggtacttcatctatgtattgttattatctattgtttctgtttttggccaccacgttctgtgcttatcttttacttcagactctgggaagaggtctacttctgatttagtccttgcattcccgaagtccttccttcctggccttttccatgctcgaagccctgaaagccaattccctggatggacactcgcatgcatggacagatggctagacaggtaggcggctggctggctggagagcaggacagaggaactaaggactgtgaggaagcaagaagggcactcactcttccttcgtgaactcctacgagttcctcttgttcctctgggacagcagcacacatccatcctctctcacacatttgattcctaagcacgttctcagggggaggtctcacaatttctctcctgccagcactacattaaaagctcactggcacacagcagcaagggtaagctacaaggggtccgcagctggaagggttaggtttatgactgaaccacaatccacatatcactgctctgacttcatattgaagaaacagaagttttctgctgggaaaagtctgcaggccttcccgctctcacctgcttcccacgtctccccacctctacagagatacctttcatctttcctaagaccctcatcacctactcacatcaaactttaattcttaacccaggaggttccgaaaacgacagatgaggaaataaaggccacaccgcgaaaaataaaacaggttagtcgacagcaaaaggagtacctgccaataagagcacagtttgtcccagttgctgcttttaacttccccgctctcctggcattaatagaaataaaacggcgcgtctccagcctcatgctgctaatgtacagttagcaccccaggcaacaggagccacggagttcaagtgcagtggagactaactcaagtaaacagattgtagacacgattgattgcaacacttagtctcatggtgccactcaccacagctgttggctttcatgtaaaaacagggagtcctgtgttgggagagccccatggaaccatgtaggccctccatgtcacagaagtacctctctgacatagagaaaagatggaggggccagcaaagaatgaatgagaagtgctgtcgggcggcgggcaggagttgttgttcccatagagggttgcctggttccaacaggctcctctaccctacatgccaatgcctgcttccttccttcccccgcctcctaccgccaggactctgccccaggcacagcagctgtcccaccagatgcctgccttccagcgaggacatttctctacactggcccatctgagcacttcgatggtccagcccaaggtcacctttctcatttgctcatacctccacgtcagatttgtactattgtccctggtggtgtcagcgctgctaactgctcagaacagtgaccaatgtcactgatccaaaggggcaaatgacttaagatctgactcggtggccctctggagttcacaaggtgctgccagcaccacagagactgctcttcactgtgtgatcgcttccctgtgcaacagaggtctctccaaggcaagcatttccttttctctttattctttccattccaacccagctggaggatcctgtgtgccaacaaaacttcatcatttccagcaaaaacttagatgaacctgtgtcctcgtgtggctggagctgagcatgatcaaaggcctctgaaaagagactacaagcctggcctgtagaccctgcttacaccatgctacctgctcacaccctttcatcatgtccaatgcctccaagtctaccctcaccacacgcaaacatggctcttggggcctgagattcaaactgtcatttcttgaggaacttatgtgttgaataaggtcttgccttacacagcaccatgctcctctctaagcaggctgggaaagtctaccctcttctcccacaggcgggctcatgctgaggagccccaggaccttgtgcctcagcttgccagaaccaacccagcgatgctaaagaagtggtgagattccttctgtcttaccccaacaactcacccctttatgcactggagggcagaaacaaaatgtccaggtttgttgaaatgatactcagaaacccaagacgactgctaaggggtgagaatgcaagtcagtcttttgttaagtcttaaattttgacatttccggtccccggtcctgctccctcaacctcccacctgtgttctgctttatggaactgcaacatgtctgttgagcagggcttcccgtgcagagacagctaagtgacaggggaaggagtcacctggctggcactggttacaagtccccccccccccccgccccattctgtagcttctgcattctagtcttcttggggaaatgcccactggtaaatgacagcagtcggctggtgtgtcaggagtgctctctaaagacataaaacacataagatatggttcataagatacttgcagggtgctattaggaggcatggcgaggctacctcaaacaagttgttttacatgtgctcacgtacatacatatctacagaaaatattacagtgtatgtaaaaaatggcatctctctattcagacatggtatctaaatccctacaagcatcgatgtgattaaattactccagtgagctcccttgcaaaagtcgggtgtttattgctgcttgtgtctgcaacaatttccagacatgagccctgctggttcattgcctggacacagataaagttccttagctctaaccacttcaactcaaggtcattagttatgtttaattctgtaatttggattccagacttttaaaaacatacagcctggtcactgaaacatgactgggcactctgcagtgagttactctgccatcctcagtaatggaaatcggtcatggaagacaggtgcttccacagacagctctttccttcaggatggtaacagggaactagaatccaagagtaaaatgtccccctgagccttgagtccatctcctgccctgagtgttgcacgcccctctaccacacaggtgctcaggaggacggagccattttaggagagcctcatagaggtcataagatattctgacctctttccagctatggccgtgagccactggcacagggaatgaacactgccaactgcctatcacagccatccggtccatactgttgacctgcggtaggagcaacttcaataccacaagcaagacacttggccaactggcttcccttggcctctccttccatagcctagccttccgtccttgccccaggttccccctccctcccttctctgtcctacattatcctgacaggtcctaaccataatctcacatgttacagtaaacacactagttagcacacacacacaaaaggctcatccctgacaggcagggcttaagattcggcctggagtttagagcagctacatcttcagcctggatgctgttacaccttccattcaggtcactcaatctctctctgcctgttcacacatgcacgcacgcacacacgcccaccctctgtaaactgggggtaatgaatacctccttcaaagggaagcatcaagacgaaatcagatcaggcacaagatgagtgcctgtgatcctatcaattttaaaaaagcattccaaaacacattaaggtgaaattagcacttctgttgaatgtgataaatcgaacatctgatcatttctctctcctcaacactccagaaatgagaagaaactttgaagaaatgtgataaagaacccaatagaaccggaaaggtgtgagtgagaacacagaggctcccagagctggggaaagggtaagtaccaggttctacagaggtggggagcactgctcaaacacgagaacaggagtttgcatccccaacacccacataaaagccaaacagtctctacagatgtctatcatcctaggccttggaggtggagacagagatgtctgaacagcagattgtctagactagcagaattggtgagagaccctgcctcagtacataaaggaagatgcccagtgtcaacctttggtctccacacacaagtgtgcacatgcgtgttcacacttacactcatgtgcccatgggtctacacgagggcctctgaatacacattacagcttcccctttagtcttttttatgggattccctaatgtgtggacaagtggtctctgattcttgtgtcttctcttggggacctttttcttctcttggtttgccttgtccaattttgatgtgatgggttttgtcttatcttgttatattttatttatgttttgttgttatcgcttaaaagcctgttcatttttaatgacagacagacagacagacagacagacagggagtggatcaagactggaggagggaagggaagggtaagagctgggagggggaaccataatcaggatatattatatgagaaaataatctgttttttaatgagaagggaaaagaaagtggggtgtgtgggaagtatgaggcaattcagagagaaaacaatacaactaaataactctctgagacgtacaaaactatattgtgcccatcaatgtcactttaaaaaggggcaaagaaagtattgtgtgtggtagctggaaaaggtctacaaaaagtatggatggaaacgttttggagaactctctgctcaaagaacaacaaagacaaacaaaatggagagaaaagagcatttaaagatcaacctaagagctttagcttcttattgactgaaaatacaaaaagaagagagagaaaaaataatcaaaaaaattctgtgaaatcaaaggcaagggttttcaagttgacaaagccacaataaataaatagccctgggacacataccactgggaccattcggggaaggagaataactaaaagaccccgagccttgtagagaggtggagggaagaagagatcagaccacatctaataacagggatcagagtgacgctacacttaacagagacaccagaacttccaggactctggagagatgccttccaaattctgagggaagttaattttaacttatatt
